(19) United States
(12) Patent Application Publication
(10) Pub. No.: US 2021/0177896 A1
(43) Pub. Date: Jun. 17, 2021

(54) THERAPEUTIC REGIMENS FOR CHIMERIC ANTIGEN RECEPTOR (CAR)- EXPRESSING CELLS

(71) Applicants: David L. Porter, (US); Noelle Frey, (US); Carl H. June, (US); Simon Lacey, (US); Fang Chen, (US); Jan J. Melenhorst, (US); Tetiana Taran, (US); Karen Thudium Mueller, (US); Patricia Wood, (US); Yiyun Zhang, (US); Novartis AG, Basel (CH); The Trustees of the University of Pennsylvania, Philadelphia, PA (US)

(72) Inventors: David L. Porter, Springfield, PA (US); Noelle Frey, Philadelphia, PA (US); Carl H. June, Merion Station, PA (US); Simon Lacey, Media, PA (US); Fang Chen, Ardmore, PA (US); Jan J. Melenhorst, Cherry Hill, NJ (US); Tetiana Taran, (US); Karen Thudium Mueller, Morristown, NJ (US); Patricia Wood, West Orange, NJ (US); Yiyun Zhang, Basking Ridge, NJ (US)

(21) Appl. No.: 16/305,728

(22) PCT Filed: Jun. 2, 2017
(86) PCT No.: PCT/US2017/035778

§ 371 Date: Nov. 29, 2018

Related U.S. Application Data
(60) Provisional application No. 62/492,784, filed on May 1, 2017.
(60) Provisional application No. 62/490,911, filed on Apr. 27, 2017.
(60) Provisional application No. 62/455,547, filed on Feb. 6, 2017.
(60) Provisional application No. 62/434,974, filed on Dec. 15, 2016.
(60) Provisional application No. 62/429,294, filed on Dec. 2, 2016.
(60) Provisional application No. 62/381,163, filed on Aug. 30, 2016.
(60) Provisional application No. 62/344,958, filed on Jun. 2, 2016.

(51) Int. Cl. A61K 35/17; A61P 35/00; C07K 14/705; G01N 33/50; G01N 33/68; C07K 16/28

(52) U.S. Cl. CPC A61K 35/17; A61P 35/00; C07K 14/705; G01N 2800/52; G01N 33/68; C07K 16/2803; G01N 33/5008

(57) ABSTRACT

The invention provides a method of treating an adult subject having a hematological cancer, comprising administering to the subject selected dosage regimens comprising a plurality of immune effector cells expressing a CAR molecule.

[0001] This application is a U.S. National Stage Application under 35 U.S.C. § 371 of International Application No. PCT/US2017/035778, filed Jun. 2, 2017, which claims priority to U.S. Ser. No. 62/344,958 filed Jun. 2, 2016, U.S. Ser. No. 62/381,163 filed Aug. 30, 2016, U.S. Ser. No. 62/429,294 filed Dec. 2, 2016, U.S. Ser. No. 62/434,974 filed Dec. 15, 2016, U.S. Ser. No. 62/455,547 filed Feb. 6, 2017, U.S. Ser. No. 62/490,911 filed Apr. 27, 2017, and U.S. Ser. No. 62/492,784 filed May 1, 2017, the contents of all of which are incorporated herein by reference in their entireties.

### SEQUENCE LISTING

[0002] The instant application contains a Sequence Listing which has been submitted electronically in ASCII format and is hereby incorporated by reference in its entirety. Said ASCII copy, created on Sep. 12, 2017, is named N2067-7110WO_SL.TXT and is 1,007,053 bytes in size.

### FIELD OF THE INVENTION

[0003] The present invention relates, at least in part, to dosage regimens for immune cells engineered to express a Chimeric Antigen Receptor (CAR).

### BACKGROUND OF THE INVENTION

[0004] Many patients with B cell malignancies are incurable with standard therapy. In addition, traditional treatment options often have serious side effects. Attempts have been made in cancer immunotherapy, however, several obstacles render this a very difficult goal to achieve clinical effectiveness. Although hundreds of so-called tumor antigens have been identified, these are generally derived from self and thus are poorly immunogenic. Furthermore, tumors use several mechanisms to render themselves hostile to the initiation and propagation of immune attack.

[0005] Recent developments using chimeric antigen receptor (CAR) modified autologous T cell (CART) therapy, which relies on redirecting T cells to a suitable cell-surface molecule on cancer cells such as B cell malignancies, show promising results in harnessing the power of the immune system to treat B cell malignancies and other cancers (see, e.g., Sadelain et al., Cancer Discovery 3:388-398 (2013)). The clinical results of the murine derived CART19 (i.e., “CTL019”) have shown promise in establishing complete remissions in patients suffering with CLL as well as in childhood ALL (see, e.g., Kalos et al., Sci Transl Med 3:95ra73 (2011), Porter et al., NEJM 365:725-733 (2011), Grupp et al., NEJM 368:1509-1518 (2013)). Besides the ability for the chimeric antigen receptor on the genetically modified T cells to recognize and destroy the targeted cells, a successful therapeutic T cell therapy needs to have the ability to proliferate and persist over time, in order to survey for leukemic relapse. The variable quality of T cells, resulting from anergy, suppression, or exhaustion, will have effects on CAR-transformed T cells' performance, over which skilled practitioners have limited control at this time. To be effective, CAR transformed patient T cells need to persist and maintain the ability to proliferate in response to the cognate antigen. It has been shown that ALL patient T cells perform can do this with CART19 comprising a murine scFv (see, e.g., Grupp et al., NEJM 368:1509-1518 (2013)).

### SUMMARY OF THE INVENTION

[0006] The disclosure features, at least in part, CAR dosage regimens that maintain efficacy while reducing side effects. In one embodiment, the invention pertains to a method of treating a subject having a cancer (e.g., a hematological cancer), comprising administering to the subject a plurality of cells comprising a CAR molecule. In another embodiment, the plurality of CAR-expressing cells is administered as a single dose, e.g., a single dose as described herein. In other embodiments, the plurality of CAR-expressing cells are administered as multiple doses, e.g., a first dose, a second dose, and optionally a third dose, e.g., as described herein. Additionally disclosed are assays and methods for evaluating responsiveness to a CAR therapy or monitoring a subject undergoing a CAR therapy, e.g., a B cell-targeting CAR therapy, by detecting the level of soluble BCMA; or methods of evaluating the suitability for manufacturing of a CAR therapy. Accordingly, methods and compositions comprising a plurality of CAR-expressing cells, as well as methods of monitoring, or making, a CAR therapy are disclosed.

[0007] Accordingly, in one aspect, disclosed herein is a plurality of cells that express a chimeric antigen receptor (CAR) molecule for use in the treatment of a subject having hematological cancer. In embodiments, the CAR molecule binds to a B-cell antigen, e.g., a CD19, BCMA, CD20, CD10, CD22, CD34, CD123, FLT-3, ROR1, CD79b, CD179b, or CD79a. In one embodiment, the CAR molecule is:

[0008] (i) a murine CAR molecule that binds to CD19, and wherein the hematological cancer is acute lymphoid leukemia (ALL);

[0009] (ii) a humanized CAR molecule that binds to CD19; or

[0010] (iii) a CAR molecule that binds to BCMA.

[0011] In one embodiment, the plurality of CAR-expressing cells are administered at a dose of about 0.2×10⁶ to 5.0×10⁶ (e.g., 0.2×10⁶ to 5.0×10⁶) viable CAR-expressing cells/kg, e.g., when the subject weighs ≤50 kg; or at a dose of about 0.1×10⁸ to 2.5×10⁸ (e.g., 0.1×10⁸ to 2.5×10⁸) viable CAR-expressing cells, e.g., when the subject weighs >50 kg.

[0012] In one aspect, disclosed herein is a method of treating a subject having a hematological cancer, comprising administering to the subject in need thereof a plurality of cells that express a chimeric antigen receptor (CAR) molecule. In embodiments, the CAR molecule binds to a B-cell antigen, e.g., a CD19, BCMA, CD20, CD10, CD22, CD34, CD123, FLT-3, ROR1, CD79b, CD179b, or CD79a. In one embodiment, the CAR molecule is:

[0013] (i) a murine CAR molecule that binds to CD19, and wherein the hematological cancer is acute lymphoid leukemia (ALL);

[0014] (ii) a humanized CAR molecule that binds to CD19; or

[0015] (iii) a CAR molecule that binds to BCMA.

[0016] In one embodiment, the plurality of cells is administered at:

[0017] at a dose of about 0.2×10⁶ to 5.0×10⁶ (e.g., 0.2×10⁶ to 5.0×10⁶) viable CAR-expressing cells/kg, e.g., when the subject weighs ≤50 kg; or at a dose of about 0.1×10⁸ to 2.5×10⁸ (e.g., 0.1×10⁸ to 2.5×10⁸) viable CAR-expressing cells, e.g., when the subject weighs >50 kg.

[0018] In one embodiment, the plurality of cells is administered at:

[0019] (i) a dose of about 0.2×10⁶ to 2.0×10⁶ (e.g., 0.2×10⁶ to 2.0×10⁶), about 0.2×10⁶ to 1.8×10⁶ (e.g., 0.2×10⁶ to 1.8×10⁶), about 0.2×10⁶ to 1.6×10⁶ (e.g., 0.2×10⁶ to 1.6×10⁶), about 0.2×10⁶ to 1.4×10⁶ (e.g., 0.2×10⁶ to 1.4×10⁶), about 0.2×10⁶ to 1.2×10⁶ (e.g., 0.2×10⁶ to 1.2×10⁶), about 0.2×10⁶ to 1.0×10⁶ (e.g., 0.2×10⁶ to 1.0×10⁶), about 0.2×10⁶ to 0.8×10⁶ (e.g., 0.2×10⁶ to 0.8×10⁶), about 0.2×10⁶ to 0.6×10⁶ (e.g., 0.2×10⁶ to 0.6×10⁶), or about 0.2×10⁶ to 0.4×10⁶ (e.g., 0.2×10⁶ to 0.4×10⁶) viable CAR-expressing cells/kg, e.g., when the subject weighs ≤50 kg;

[0020] (ii) a dose of about 0.2×10⁶ (e.g., 0.2×10⁶), about 0.4×10⁶ (e.g., 0.4×10⁶), about 0.6×10⁶ (e.g., 0.6×10⁶), about 0.8×10⁶ (e.g., 0.8×10⁶), about 1.0×10⁶ (e.g., about 1.0×10⁶), about 1.5×10⁶ (e.g., 1.5×10⁶), about 2.0×10⁶ (e.g., 2.0×10⁶), about 2.5×10⁶ (e.g., 2.5×10⁶), about 3.0×10⁶ (e.g., 3.0×10⁶), about 3.5×10⁶ (e.g., 3.5×10⁶), about 4.0×10⁶ (e.g., 4.0×10⁶), about 4.5×10⁶ (e.g., 4.5×10⁶), or about 5.0×10⁶ (e.g., 5.0×10⁶) viable CAR-expressing cells/kg, e.g., when the subject weighs ≤50 kg;

[0021] (iii) a dose of about 0.1×10⁸ to 1.0×10⁸ (e.g., 0.1×10⁸ to 1.0×10⁸), about 0.1×10⁸ to 0.9×10⁸ (e.g., 0.1×10⁸ to 0.9×10⁸), about 0.1×10⁸ to 0.8×10⁸ (e.g., 0.1×10⁸ to 0.8×10⁸), about 0.1×10⁸ to 0.6×10⁸ (e.g., 0.1×10⁸ to 0.6×10⁸), about 0.1×10⁸ to 0.4×10⁸ (e.g., 0.1×10⁸ to 0.4×10⁸), about 0.1×10⁸ to 0.2×10⁸ (e.g., 0.1×10⁸ to 0.2×10⁸), about 0.2×10⁸ to 1.0×10⁸ (e.g., 0.2×10⁸ to 1.0×10⁸), about 0.2×10⁸ to 0.9×10⁸ (e.g., 0.2×10⁸ to 0.9×10⁸), about 0.2×10⁸ to 0.8×10⁸ (e.g., 0.2×10⁸ to 0.8×10⁸), about 0.2×10⁸ to 0.6×10⁸ (e.g., 0.2×10⁸ to 0.6×10⁸), or about 0.2×10⁸ to 0.4×10⁸ (e.g., 0.2×10⁸ to 0.4×10⁸) viable CAR-expressing cells, e.g., when the subject weighs >50 kg; or

[0022] (iv) a dose of about 0.1×10⁸ (e.g., 0.1×10⁸), about 0.2×10⁸ (e.g., 0.2×10⁸), about 0.4×10⁸ (e.g., 0.4×10⁸), about 0.6×10⁸ (e.g., 0.6×10⁸), about 0.8×10⁸ (e.g., 0.8×10⁸), about 1.0×10⁸ (e.g., 1.0×10⁸), about 1.5×10⁸ (e.g., 1.5×10⁸), about 2.0×10⁸ (e.g., 2.0×10⁸), or about 2.5×10⁸ (e.g., 2.5×10⁸) viable CAR-expressing cells, e.g., when the subject weighs >50 kg.

[0023] In one embodiment, the subject is a pediatric or young adult. In one embodiment, the subject is aged about 3 to 23 years, e.g., aged 3 to 23 years. In one embodiment, the subject is aged about 1 to 24 years, e.g., aged 1 to 24 years. In one embodiment, the subject is aged about 3 to 25 years, e.g., aged 3 to 25 years.

[0024] In one embodiment, the subject is an adult.

[0025] In one embodiment, the hematological cancer is chosen from acute leukemia, B-cell acute lymphoid leukemia (BALL), T-cell acute lymphoid leukemia (TALL), small lymphocytic leukemia (SLL), acute lymphoid leukemia (ALL), chronic leukemia, chronic myelogenous leukemia (CML), chronic lymphocytic leukemia (CLL), non-Hodgkin lymphoma, or multiple myeloma. In one embodiment, the hematological cancer is acute lymphoid leukemia (ALL), e.g., relapsed or refractory B-cell ALL. In one embodiment, the hematological cancer is relapsed or refractory CD19+ ALL. In one embodiment, the hematological cancer has CNS involvement.

[0026] In one aspect, disclosed herein is a container (e.g., an infusion bag) comprising a plurality of cells that express a chimeric antigen receptor (CAR) molecule. In embodiments, the CAR molecule binds to a B-cell antigen, e.g., a CD19, BCMA, CD20, CD10, CD22, CD34, CD123, FLT-3, ROR1, CD79b, CD179b, or CD79a. In one embodiment, the CAR molecule is:

[0027] (i) a murine CAR molecule that binds to CD19, and wherein the hematological cancer is acute lymphoid leukemia (ALL);

[0028] (ii) a humanized CAR molecule that binds to CD19; or

[0029] (iii) a CAR molecule that binds to BCMA.

[0030] In embodiments, the container is suitable for administration to a subject having hematological cancer at a dose of about 0.2×10⁶ to 5.0×10⁶ viable CAR-expressing cells/kg, e.g., when the subject weighs ≤50 kg; or a dose of about 0.1×10⁸ to 2.5×10⁸ viable CAR-expressing cells, e.g., when the subject weighs >50 kg.

[0031] In one embodiment, the container (e.g., an infusion bag) is suitable for administration at:

[0032] (i) a dose of about 0.2×10⁶ to 2.0×10⁶ (e.g., 0.2×10⁶ to 2.0×10⁶), about 0.2×10⁶ to 1.8×10⁶ (e.g., 0.2×10⁶ to 1.8×10⁶), about 0.2×10⁶ to 1.6×10⁶ (e.g., 0.2×10⁶ to 1.6×10⁶), about 0.2×10⁶ to 1.4×10⁶ (e.g., 0.2×10⁶ to 1.4×10⁶), about 0.2×10⁶ to 1.2×10⁶ (e.g., 0.2×10⁶ to 1.2×10⁶), about 0.2×10⁶ to 1.0×10⁶ (e.g., 0.2×10⁶ to 1.0×10⁶), about 0.2×10⁶ to 0.8×10⁶ (e.g., 0.2×10⁶ to 0.8×10⁶), about 0.2×10⁶ to 0.6×10⁶ (e.g., 0.2×10⁶ to 0.6×10⁶), or about 0.2×10⁶ to 0.4×10⁶ (e.g., 0.2×10⁶ to 0.4×10⁶) viable CAR-expressing cells/kg, e.g., when the subject weighs ≤50 kg;

[0033] (ii) a dose of about 0.2×10⁶ (e.g., 0.2×10⁶), about 0.4×10⁶ (e.g., 0.4×10⁶), about 0.6×10⁶ (e.g., 0.6×10⁶), about 0.8×10⁶ (e.g., 0.8×10⁶), about 1.0×10⁶ (e.g., about 1.0×10⁶), about 1.5×10⁶ (e.g., 1.5×10⁶), about 2.0×10⁶ (e.g., 2.0×10⁶), about 2.5×10⁶ (e.g., 2.5×10⁶), about 3.0×10⁶ (e.g., 3.0×10⁶), about 3.5×10⁶ (e.g., 3.5×10⁶), about 4.0×10⁶ (e.g., 4.0×10⁶), about 4.5×10⁶ (e.g., 4.5×10⁶), or about 5.0×10⁶ (e.g., 5.0×10⁶) viable CAR-expressing cells/kg, e.g., when the subject weighs ≤50 kg;

[0034] (iii) a dose of about 0.1×10⁸ to 1.0×10⁸ (e.g., 0.1×10⁸ to 1.0×10⁸), about 0.1×10⁸ to 0.9×10⁸ (e.g., 0.1×10⁸ to 0.9×10⁸), about 0.1×10⁸ to 0.8×10⁸ (e.g., 0.1×10⁸ to 0.8×10⁸), about 0.1×10⁸ to 0.6×10⁸ (e.g., 0.1×10⁸ to 0.6×10⁸), about 0.1×10⁸ to 0.4×10⁸ (e.g., 0.1×10⁸ to 0.4×10⁸), about 0.1×10⁸ to 0.2×10⁸ (e.g., 0.1×10⁸ to 0.2×10⁸), about 0.2×10⁸ to 1.0×10⁸ (e.g., 0.2×10⁸ to 1.0×10⁸), about 0.2×10⁸ to 0.9×10⁸ (e.g., 0.2×10⁸ to 0.9×10⁸), about 0.2×10⁸ to 0.8×10⁸ (e.g., 0.2×10⁸ to 0.8×10⁸), about 0.2×10⁸ to 0.6×10⁸ (e.g., 0.2×10⁸ to 0.6×10⁸), or about 0.2×10⁸ to 0.4×10⁸ (e.g., 0.2×10⁸ to 0.4×10⁸) viable CAR-expressing cells, e.g., when the subject weighs >50 kg; or

[0035] (iv) a dose of about 0.1×10⁸ (e.g., 0.1×10⁸), about 0.2×10⁸ (e.g., 0.2×10⁸), about 0.4×10⁸ (e.g., 0.4×10⁸), about 0.6×10⁸ (e.g., 0.6×10⁸), about 0.8×10⁸ (e.g., 0.8×10⁸), about 1.0×10⁸ (e.g., 1.0×10⁸), about 1.5×10⁸ (e.g., 1.5×10⁸), about 2.0×10⁸ (e.g., 2.0×10⁸), or about 2.5×10⁸ (e.g., 2.5×10⁸) viable CAR-expressing cells, e.g., when the subject weighs >50 kg.

[0036] In one aspect, disclosed herein is a kit comprising:

[0037] (i) a container (e.g., an infusion bag) comprising a plurality of cells that express a chimeric antigen receptor (CAR) molecule; and

[0038] (ii) instructions for administration.

[0039] In embodiments, the CAR molecule binds to a B-cell antigen, e.g., a CD19, BCMA, CD20, CD10, CD22, CD34, CD123, FLT-3, ROR1, CD79b, CD179b, or CD79a. In one embodiment, the CAR molecule is:

[0040] (a) a murine CAR molecule that binds to CD19, and wherein the hematological cancer is acute lymphoid leukemia (ALL);

[0041] (b) a humanized CAR molecule that binds to CD19; or

[0042] (c) a CAR molecule that binds to BCMA,

[0043] In embodiments, the container is suitable for administration to a subject having hematological cancer at a dose of about 0.2×10⁶ to 5.0×10⁶ (e.g., 0.2×10⁶ to 5.0×10⁶) viable CAR-expressing cells/kg, e.g., when the subject weighs ≤50 kg; or a dose of about 0.1×10⁸ to 2.5×10⁸ (e.g., 0.1×10⁸ to 2.5×10⁸) viable CAR-expressing cells, e.g., when the subject weighs >50 kg.

[0044] In one aspect, disclosed herein are a plurality of cells that express a chimeric antigen receptor (CAR) molecule for use in the treatment of a subject having hematological cancer. In embodiments, the CAR molecule binds to a B-cell antigen, e.g., a CD19, BCMA, CD20, CD10, CD22, CD34, CD123, FLT-3, ROR1, CD79b, CD179b, or CD79a. In one embodiment, the CAR molecule is:

[0045] (i) a murine CAR molecule that binds to CD19, and wherein the hematological cancer is acute lymphoid leukemia (ALL);

[0046] (ii) a humanized CAR molecule that binds to CD19; or

[0047] (iii) a CAR molecule that binds to BCMA.

[0048] In embodiments, the plurality of cells are administered in at least two (e.g., three) doses, which together add up to a total dose of, e.g., at least about 0.2×10⁶ (e.g., 0.2×10⁶) viable CAR-expressing cells/kg, e.g., when the subject weighs ≤50 kg; or a total dose of at least about 0.1×10⁸ (e.g., 0.1×10⁸) viable CAR-expressing cells, e.g., when the subject weighs >50 kg.

[0049] In one aspect, disclosed herein is a method of treating a subject having hematological cancer, comprising administering to the subject at least two (e.g., three) doses of a plurality of cells that express a chimeric antigen receptor (CAR) molecule. In embodiments, the CAR molecule binds to a B-cell antigen, e.g., a CD19, BCMA, CD20, CD10, CD22, CD34, CD123, FLT-3, ROR1, CD79b, CD179b, or CD79a. In one embodiment, the CAR molecule is:

[0050] (i) a murine CAR molecule that binds to CD19, and wherein the hematological cancer is acute lymphoid leukemia (ALL);

[0051] (ii) a humanized CAR molecule that binds to CD19; or

[0052] (iii) a CAR molecule that binds to BCMA, In embodiments, the at least two (e.g., three) doses together add up to a total dose of at least about 0.2×10⁶ (e.g., 0.2×10⁶) viable CAR-expressing cells/kg, e.g., when the subject weighs ≤50 kg; or a total dose of at least about 0.1×10⁸ (e.g., 0.1×10⁸) viable CAR-expressing cells, e.g., when the subject weighs >50 kg.

[0053] In one embodiment, the at least two (e.g., three) doses are administered separately with a time interval of about one day.

[0054] In one embodiment, the at least two (e.g., three) doses comprise a first dose, a second dose, and a third dose, wherein the first dose is administered on a first day of treatment, the second dose is administered on a subsequent (e.g., second, third, fourth, fifth, sixth, or seventh or later) day of treatment, and the third dose is administered on a yet subsequent (e.g., third, fourth, fifth, sixth, seventh, eighth, ninth, tenth, or later) day of treatment.

[0055] In one embodiment, the at least two (e.g., three) doses comprise a first dose, a second dose, and a third dose, wherein the first dose is administered on the first day of treatment, the second dose is administered on the second day of treatment, and the third dose is administered on the third day of treatment.

[0056] In one embodiment, the at least two (e.g., three) doses comprise a first dose, a second dose, and a third dose, wherein the first dose is about 10% (e.g., 10%) of the total dose, the second dose is about 30% (e.g., 30%) of the total dose, and the third dose is about 60% (e.g., 60%) of the total dose.

[0057] In one embodiment, the total dose is about 5×10⁷ to 5×10⁸ viable CAR-expressing cells (e.g., about 5×10⁷, e.g., 5×10⁷, or about 5×10⁸, e.g., 5×10⁸, viable CAR-expressing cells).

[0058] In embodiments, the CAR-expressing cells (e.g., CD19 CAR-expressing cells or BCMA CAR-expressing cells) are administered to the subject according to a dosing regimen comprising a total dose of cells administered to the subject by dose fractionation, e.g., one, two, three or more separate administration of a partial dose. In embodiments, a first percentage of the total dose is administered on a first day of treatment, a second percentage of the total dose is administered on a subsequent (e.g., second, third, fourth, fifth, sixth, or seventh or later) day of treatment, and optionally, a third percentage (e.g., the remaining percentage) of the total dose is administered on a yet subsequent (e.g., third, fourth, fifth, sixth, seventh, eighth, ninth, tenth, or later) day of treatment. For example, 10% of the total dose of cells is delivered on the first day, 30% of the total dose of cells is delivered on the second day, and the remaining 60% of the total dose of cells is delivered on the third day of treatment. For example, a total cell dose includes 1 to 5×10⁷ or 1 to 5×10⁸ CAR-expressing cells (e.g., CD19 CAR-expressing cells or BCMA CAR-expressing cells).

[0059] In one embodiment of the preceding methods, the plurality of cells comprise T cells or NK cells.

[0060] In embodiments, the subject is a mammal, e.g., a human.

[0061] In one embodiment, the subject is a pediatric or young adult. In one embodiment, the subject is aged about 3 to 23 years, e.g., aged 3 to 23 years. In one embodiment, the subject is aged about 1 to 24 years, e.g., aged 1 to 24 years. In one embodiment, the subject is aged about 3 to 25 years, e.g., aged 3 to 25 years.

[0062] In one embodiment, the subject is an adult.

[0063] In one embodiment, the hematological cancer is chosen from acute leukemia, B-cell acute lymphoid leukemia (BALL), T-cell acute lymphoid leukemia (TALL), small lymphocytic leukemia (SLL), acute lymphoid leukemia (ALL), chronic leukemia, chronic myelogenous leukemia (CML), chronic lymphocytic leukemia (CLL), non-Hodgkin lymphoma, or multiple myeloma. In one embodiment, the hematological cancer is acute lymphoid leukemia (ALL), e.g., relapsed or refractory B-cell ALL. In one embodiment, the hematological cancer is relapsed or refractory CD19+ ALL. In one embodiment, the hematological cancer has CNS involvement.

### CRS Treatment

[0064] The disclosure also features, at least in part, CAR dosage regimens that maintain efficacy while reducing the risk of CRS (cytokine release syndrome). In one embodiment shown in Example 26, dividing a dose of CAR expressing cells for administration in three increments can produce as good efficacy as a single dose, but without a concomitant increase in severe CRS.

[0065] In embodiments, the subject is evaluated for CRS after receiving a dose, e.g., after receiving the first dose, the second dose, and/or the third dose.

[0066] In embodiments, the subject receives a CRS treatment, e.g., tocilizumab, bazedoxifene, a corticosteroid, etanercept, or siltuximab. In embodiments, the CRS treatment is administered before or after the first dose of cells comprising the CAR molecule. In embodiments, the CRS treatment is administered before or after the second dose of cells comprising the CAR molecule. In embodiments, the CRS treatment is administered before or after the third dose of cells comprising the CAR molecule. In embodiments, the CRS treatment is administered between the first and second doses of cells comprising the CAR molecule, and/or between the second and third doses of cells comprising the CAR molecule.

[0067] In embodiments, in a subject having CRS after the first dose, e.g., CRS grade 1, 2, 3, or 4, the second dose is administered at least 2, 3, 4, or 5 days after the first dose. In embodiments, in a subject having CRS after the second dose, e.g., CRS grade 1, 2, 3, or 4, the third dose is administered at least 2, 3, 4, or 5 days after the second dose. In embodiments, in a subject having CRS after the first dose, the second dose of CAR-expressing cells is delayed relative to when the second dose would have been administered had the subject not had CRS. In embodiments, in a subject having CRS after the second dose, the third dose of CAR-expressing cells is delayed relative to when the third dose would have been administered had the subject not had CRS.

[0068] In embodiments, the subject has a cancer with a high disease burden before the first dose is administered. In embodiments, the subject has bone marrow blast levels of at least 1%, 2%, 3%, 4%, 5%, 6%, 7%, 8%, 9%, 10%, 15%, 20%, 25%, 30%, 35%, 40%, 45%, or 50%, e.g., at least 5%. In embodiments, the subject has a cancer in stage I, II, III, or IV. In embodiments, the subject has a tumor mass of at least 1, 2, 5, 10, 20, 50, 100, 200, 500, or 1000 g, e.g., in a single tumor or a plurality of tumors.

[0069] In some embodiments, the subject has cancer (e.g., a solid cancer or a hematological cancer as described herein). In an embodiment, the subject has CLL. In embodiments, the subject has ALL. In other embodiments, the subject has multiple myeloma.

[0070] In one embodiment, the cancer is a disease associated with CD19 expression, e.g., as described herein.

[0071] In other embodiments, the cancer is a disease associated with a tumor antigen, e.g., a B-cell antigen as described herein. In embodiments, the CAR molecule is a CAR molecule as described herein (e.g., a CAR molecule that binds to a B-cell antigen, e.g., CD19 CAR or a BCMA CAR described herein).

### Additional Therapeutic Methods

[0072] In another aspect, the present disclosure provides a method of treating a subject having a hematological cancer with CNS (central nervous system) involvement. The present disclosure also provides, in some aspects, a method of reducing CNS involvement or preventing a relapse of CNS involvement in a subject having a hematologic cancer. The method comprises administering to the subject in need thereof an effective number of immune effector cells expressing a CAR molecule, e.g., a CAR molecule that binds to a B-cell antigen, e.g., CD19 or BCMA. In some embodiments, the hematological cancer is a leukemia, e.g., acute lymphoid leukemia (ALL), e.g, relapsed or refractory ALL. In embodiments, the hematological cancer is a metastatic hematological cancer, e.g., a metastatic leukemia or lymphoma. In other embodiments, the hematological cancer is chosen from CNS lymphoma, CNS leukemia, or CNS AML. In some embodiments, the subject is a pediatric or young adult subject.

[0073] In one embodiment, CNS involvement is determined by measuring the presence of hematological cancer cells (e.g., blast cells) in cerebral spinal fluid (CSF).

[0074] In some embodiments, the subject has, or is identified as having, a hematological cancer with CNS involvement, e.g., a relapsed or refractory hematological cancer with CNS involvement. In some embodiments, the subject has, or is identified as having, relapsed or refractory ALL with CNS involvement. In some embodiments, the subject has, or is identified as having, active CNS3 status. In some embodiments, the subject is a pediatric or young adult subject.

[0075] In embodiments, the subject has, or is identified as having, one or more of: a CNS relapse, combined BM/CNS relapse, ocular involvement, or parenchymal changes of brain or spine. In one embodiment, the subject has or is identified as having a CNS relapse, e.g., having a score of CNS3 by lumbar puncture (LP) (e.g., ≥5 WBC/mL with blasts), or by detecting brain/ocular involvement, e.g., by imaging. In embodiments, the subject has, or is identified as having, <0.01% blasts, 0.01-5% blasts, >5% blasts, 5-50% blasts, or >50% blasts. In embodiments, the leukemia is Philadelphia chromosome positive. In embodiments, the subject is at a first or subsequent relapse (e.g., 2nd, 3rd, 4th, 5th, 6th, or 7th relapse). In embodiments, the subject was previously treated with radiation or bone marrow transplant. In embodiments, the subject was previously treated with chemotherapy or radiation.

[0076] In embodiments, the subject undergoes lymphodepletion (e.g., with fludarabine and/or cyclophosphamide) before administration of the immune effector cells.

[0077] In embodiments, after administration, the subject experiences complete response (CR), e.g., at day 28 after the administration. In embodiments, the subject has <0.01% minimal residual disease (MRD) (e.g., by flow cytometry), e.g., at day 28 after the administration or 3 months after the administration, e.g., without further anticancer therapy. In embodiments, the subject has CR with MRD (e.g., >0.01%), e.g., at day 28 after the administration or 3 months after the administration, e.g., without further anticancer therapy. In embodiments, after the administration, the subject has no CNS involvement. In embodiments, after the administration, the subject experiences a reduction in CNS status, e.g., from CNS3 to CNS2 or CNS1, or from CNS2 to CNS1. In embodiments, a subject having CNS1 has no detectable blast cells in CSF, a subject having CNS2 has <5 WBC/μl CSF with blast cells; and a subject having CNS3 has ≥5 WBC/μl CSF with blast cells. In embodiments, the subject is in CR at least at 8, 23, or 31 months after the administration, or at least at 2, 4, 6, 8, 12, 18, 24, 30, or 36 months after the administration. In embodiments, the subject experiences CR for a duration of at least 8, 23, or 31 months after the administration, or at least 2, 4, 6, 8, 12, 18, 24, 30, or 36 months after the administration.

[0078] In embodiments, the method further comprises testing a subject for CNS involvement, e.g., by lumbar puncture and/or by imaging to detect brain or ocular involvement, before or after the administration. In embodiments, the method further comprises testing a subject for bone marrow disease or MRD, before or after the administration. In embodiments, the testing is performed at one or more of 1, 3, 6, 9, or 12 months after the administration.

[0079] In embodiments, after the administration, the subject does not experience one or more of: CRS, severe CRS, encephalopathy (e.g., encephalopathy grade 2-3), seizures (e.g., seizures grade 2-4), vision disturbance, speech disturbance, trigeminal neuralgia, confusion, dizziness, ataxia, or agitation.

[0080] In some embodiments, the immune effector cell is an immune effector cell described herein. In some embodiments, the CAR molecule is a CAR molecule described herein. In some embodiments, the CAR molecule comprises the amino acid sequence of residues 22-486 of SEQ ID NO: 58, residues 22-486 of any one of SEQ ID NOs: 31-34 or 42, or residues 22-491 of any one of SEQ ID NOs: 35-41. In some embodiments the CAR molecule comprises an antigen binding domain comprising one or more sequence selected from SEQ ID NOS:1-12. In embodiments, the immune effector cells are administered as a monotherapy.

[0081] In embodiments, a CAR therapy described herein can be used in lieu of a standard of care for CNS involvement, e.g., radiation therapy.

[0082] In yet another aspect, the present disclosure provides a method of treating one or more of a neurological toxicity, CRS, or posterior reversible encephalopathy syndrome (PRES). The method comprises administering to a subject in need thereof a therapeutically effective amount of cyclophosphamide. In related aspects, the present disclosure provides cyclophosphamide for use in treating neurological toxicity, CRS, or posterior reversible encephalopathy syndrome (PRES). In embodiments, the administration of cyclophosphamide is subsequent to a cell-based therapy, e.g., a cell-based therapy for cancer (e.g., a CD19-inhibiting therapy, or a CD19-depleting therapy), or the subject has been previously treated with a cell-based therapy, e.g., a cell-based therapy for cancer, a CD19-inhibiting therapy, or a CD19-depleting therapy. In embodiments, the administration of cyclophosphamide is prior to, at the same time as, or after the cell-based therapy.

[0083] In embodiments, the patient has, or is identified as having, CRS, PRES, or both. In some embodiments, the subject has been treated with a CD19 inhibiting or depleting therapy. In some embodiments, the CD19 inhibitor is a CD19 antibody, e.g., a CD19 bispecific antibody (e.g., a bispecific T cell engager that targets CD19, e.g., blinatumomab). In some embodiments, the therapy comprises a CAR-expressing cell, e.g., an anti-CD19 CAR. In embodiments, the subject suffers from a neurological toxicity, e.g., focal deficits (e.g., cranial nerve palsy or hemiparesis) or global abnormalities (e.g., generalized seizures, confusion), or status epilepticus. In embodiments, the subject does not have any clinical symptoms of CRS. In embodiments, the subject has one or more clinical symptoms of CRS. In embodiments, the subject has, or is identified as having, elevated IL-6 relative to a reference, e.g., to the subject's level of IL-6 prior to therapy with a CAR-expressing cell. In embodiments, the subject has, or is identified as having, elevated serum levels of a cytokine associated with CRS (e.g., IL-6 and/or IL-8) relative to a reference. In embodiments, the subject has, or is identified as having, elevated levels of a cytokine associated with CRS (e.g., CSF IL-6 and/or IL-8) relative to a reference. In embodiments, the subject is treated or has been treated with a therapy for CRS such as tocilizumab or a corticosteroid (e.g., methylprednisolone, hydrocortisone, or both). In embodiments, the subject has, or is identified as having, an increase in circulating, activated CAR-expressing cells. In embodiments, the subject has, or is identified as having, CAR-expressing cells in the CSF.

[0084] In some aspects, the present disclosure also provides a method of treating a human subject (e.g., a pediatric or young adult subject) having acute lymphoid leukemia (ALL), comprising: administering to the subject immune effector cells expressing a CAR molecule that binds to CD19, wherein said CAR molecule comprises the amino acid sequence of residues 22-486 of SEQ ID NO: 58, residues 22-486 of any one of SEQ ID NOs: 31-34 or 42, or residues 22-491 of any one of SEQ ID NOs: 35-41, at a dose of 2.0-5.0×10⁶ cells/kg (e.g., when the subject weighs ≤50 kg) or a dose of 1.0-2.5×10⁸ cells (e.g., when the subject weighs >50 kg). In a related aspect, the present disclosure provides a method of selecting a dose of subject immune effector cells expressing a CAR molecule that binds to CD19, wherein said CAR molecule comprises the amino acid sequence of residues 22-486 of SEQ ID NO: 58, residues 22-486 of any one of SEQ ID NOs: 31-34 or 42, or residues 22-491 of any one of SEQ ID NOs: 35-41 for a subject having ALL, wherein (i) if the subject weighs ≤50 kg, selecting a dose of 2.0-5.0×10⁶ cells/kg, and (ii) if the subject weighs >50 kg, selecting a dose of 1.0-2.5×10⁸ cells.

[0085] In embodiments, the subject experiences remission (e.g., CR or CRi) after the administration of the immune effector cells. In embodiments, the subject is treated with lymphodepleting chemotherapy before the administration of the immune effector cells.

[0086] In embodiments, the dose of immune effector cells is about 2.0-3.0×10⁶, 2.0-4.0×10⁶, 2.0-5.0×10⁶, 3.0-4.0×10⁶, 3.0-5.0×10⁶, or 4.0-5.0×10⁶ cells/kg. In embodiments, the dose of immune effector cells is about 2.0×10⁶, 3.0×10⁶, or 4.0×10⁶ cells/kg. In embodiments, the dose of immune effector cells is about 1.0-1.5×10⁸, 1.0-2.0×10⁸, 1.0-2.5×10⁸, 1.5-2.0×10⁸, 1.5-2.5×10⁸, or 2.0-2.5×10⁸ cells. In embodiments, the dose of immune effector cells is about 1.0×10⁸, 1.5×10⁸, or 2.0-2.5×10⁸ cells. In embodiments, the subject receives a single dose of cells. In embodiments, the subject weighs ≤50 kg. In embodiments, the subject weighs >50 kg.

[0087] In other aspects, the disclosure provides a method of treating GC (germinal center)-DLBCL, NGC (non-germinal center)-DLBCL, transformed FL, or double hit DLBCL, comprising administering to a patient in need thereof a CD19 CAR-expressing cell, thereby treating the GC-DLBCL, NGC-DLBCL, transformed FL, or double hit DLBCL.

[0088] In some embodiments, the CD19 CAR (or a nucleic acid encoding it) comprises a sequence set out in any of Table 2, Table 3, Table 4, or Table 5. In embodiments, the CD19 CAR is CTL019. In other embodiments, the CD19 CAR is CTL119. In embodiments, the double hit DLBCL is DLBCL having chromosomal breakpoints affecting the MYC/8q24 locus and a second oncogene locus and arising either from transformation of follicular lymphoma or de novo. In embodiments, the DLBCL is a CD19+ DLBCL. In embodiments, the DLBCL is stage I, II, III, or IV. In embodiments, the DLBCL has bone marrow involvement. In embodiments, the DLBCL is GC-DLBCL or NGC-DLBCL. In embodiments, the second oncogene locus is BCL2 or BCL6. In embodiments, the patient received lymphodepleting chemotherapy prior to administration of the CD19 CAR-expressing cell. In embodiments, a single dose of CD19 CAR-expressing cells are administered. In embodiments, the patient experiences CRS. In embodiments, the patient experiences a response, e.g., complete response. In embodiments, the subject is administered a single dose of CD19 CAR-expressing cells. In embodiments, the CD19 CAR-expressing cells (e.g., CTL019 cells) are administered at a dose of about 5×10⁸ cells, e.g., about 4-6×10⁸ cells. In embodiments, the CD19 CAR-expressing cells (e.g., CTL019 cells) are administered at a dose of about 5-7×10⁶ cells/kg. In embodiments, the CD19 CAR-expressing cells (e.g., CTL019 cells) are administered at a dose of about 2×10⁸ cells, e.g., about 1-3×10⁸ cells. In embodiments, the CD19 CAR-expressing cells (e.g., CTL019 cells) are administered at a dose of about 3×10⁶ cells/kg, e.g., about 2-4×10⁶ cells/kg.

### Methods of Evaluating and Monitoring a Patient

[0089] The disclosure also features a method of evaluating, or monitoring, a subject receiving or who has received a chimeric antigen receptor (CAR) cell therapy for the effectiveness of the therapy using soluble BCMA (sBCMA) as a biomarker. In one embodiment, the CAR therapy is a CAR molecule that binds to a B-cell antigen, e.g., a CD19, BCMA, CD20, CD10, CD22, CD34, CD123, FLT-3, ROR1, CD79b, CD179b, or CD79a. In one embodiment, the CAR therapy is a CD19 CAR therapy or a BCMA CAR therapy.

[0090] In one aspect, disclosed herein is a method of evaluating the effectiveness of a CAR-expressing cell therapy in a subject having hematological cancer, who has received or is receiving the CAR-expressing cell therapy, comprising measuring soluble BCMA (sBCMA) level or activity (e.g., level) in the subject (e.g., in the serum of the subject) at at least two time points after the beginning of the CAR-expressing cell therapy, e.g., using a method described herein, e.g., ELISA, wherein:

[0091] (i) a decrease in the sBCMA level or activity over time indicates that the CAR-expressing cell therapy is effective in the subject (e.g., the subject responds to the CAR-expressing cell therapy); and

[0092] (ii) the absence of a decrease in the sBCMA level or activity over time indicates that the CAR-expressing cell therapy has reduced efficacy, e.g., is ineffective or is minimally effective, in the subject (e.g., the subject does not respond or only minimally responds to the CAR-expressing cell therapy), thereby evaluating the subject.

[0093] In one embodiment,

[0094] (i) a decrease in the sBCMA level or activity at a subsequent (e.g., second, third, fourth, fifth, sixth, or seventh or later) time point relative to a prior (e.g., first, second, third, fourth, fifth, or sixth or later) time point, among the at least two time points, indicates that the CAR-expressing cell therapy is effective in the subject (e.g., the subject responds to the CAR-expressing cell therapy); and

[0095] (ii) the absence of a decrease in the sBCMA level or activity at a subsequent (e.g., second, third, fourth, fifth, sixth, or seventh or later) time point relative to a prior (e.g., first, second, third, fourth, fifth, or sixth or later) time point, among the at least two time points, indicates that the CAR-expressing cell therapy has reduced efficacy, e.g., is ineffective or is minimally effective, in the subject (e.g., the subject does not respond or only minimally responds to the CAR-expressing cell therapy).

[0096] In one embodiment, the CAR-expressing cell therapy comprises a plurality of cells that express a CAR molecule, wherein:

[0097] (i) a decrease in the sBCMA level or activity over time indicates that the plurality of cells that express a CAR molecule expand and/or persist in the subject; and

[0098] (ii) the absence of a decrease in the sBCMA level or activity over time indicates that the plurality of cells that express a CAR molecule do not expand and/or persist in the subject.

[0099] In one embodiment,

[0100] (i) a decrease in the sBCMA level or activity at a subsequent (e.g., second, third, fourth, fifth, sixth, or seventh or later) time point relative to a prior (e.g., first, second, third, fourth, fifth, or sixth or later) time point, among the at least two time points, indicates that the plurality of cells that express a CAR molecule expand and/or persist in the subject; and

[0101] (ii) the absence of a decrease in the sBCMA level or activity at a subsequent (e.g., second, third, fourth, fifth, sixth, or seventh or later) time point relative to a prior (e.g., first, second, third, fourth, fifth, or sixth or later) time point, among the at least two time points, indicates that the plurality of cells that express a CAR molecule do not expand and/or persist in the subject.

[0102] In one aspect, disclosed herein is a method of evaluating the effectiveness of a CAR-expressing cell therapy in a subject having hematological cancer, who has received or is receiving the CAR-expressing cell therapy, comprising:

[0103] (i) measuring soluble BCMA (sBCMA) level or activity (e.g., level) in the subject (e.g., in the serum of the subject) at at least one time point after the beginning of the CAR-expressing cell therapy, e.g., using a method described herein, e.g., ELISA, and

[0104] (ii) (optionally) comparing the sBCMA level or activity (e.g., level) (“sample value”) at the at least one time point with a reference sBCMA level or activity (e.g., level) (“reference value”), wherein:

[0105] (a) a decrease from the reference value to the sample value indicates that the CAR-expressing cell therapy is effective in the subject (e.g., the subject responds to the CAR-expressing cell therapy); and

[0106] (b) the absence of a decrease from the reference value to the sample value indicates that the CAR-expressing cell therapy has reduced efficacy, e.g., is ineffective or is minimally effective in the subject (e.g., the subject does not respond or only minimally responds to the CAR-expressing cell therapy), thereby evaluating the subject.

[0107] In one embodiment, the reference value is a sBCMA level or activity (e.g., level) of a sample taken from the subject prior to the at least one time point (e.g., a sample taken from the subject prior to the beginning of the CAR-expressing cell therapy, or a sample taken from the subject after the beginning of the CAR-expressing cell therapy but prior to measuring the sBCMA level or activity at the at least one time point).

[0108] In one embodiment, the reference value is a sBCMA level or activity (e.g., level) of a sample taken from a different subject having hematological cancer (e.g., the same or a different hematological cancer).

[0109] In one embodiment, the reference value is an average sBCMA level or activity (e.g., level) of samples taken from a population of subjects having hematological cancer (e.g., the same or a different hematological cancer).

[0110] In one embodiment, the CAR-expressing cell therapy comprises a plurality of cells that express a CAR molecule, wherein:

[0111] (i) a decrease from the reference value to the sample value indicates that the plurality of cells that express a CAR molecule expand and/or persist in the subject; and

[0112] (ii) the absence of a decrease from the reference value to the sample value indicates that the plurality of cells that express a CAR molecule do not expand and/or persist in the subject.

[0113] In one aspect, disclosed herein is a method of treating a subject having hematological cancer, who has received or is receiving a first CAR-expressing cell therapy, comprising measuring soluble BCMA (sBCMA) level or activity (e.g., level) in the subject (e.g., in the serum of the subject) at at least two time points after the beginning of the first CAR-expressing cell therapy, e.g., using a method described herein, e.g., ELISA, wherein if the sBCMA level or activity does not decrease over time, administer a second therapy to the subject, thereby treating the subject.

[0114] In one embodiment, if the sBCMA level or activity does not decrease at a subsequent (e.g., second, third, fourth, fifth, sixth, or seventh or later) time point relative to a prior (e.g., first, second, third, fourth, fifth, or sixth or later) time point, among the at least two time points, administer a second therapy to the subject.

[0115] In one aspect, disclosed herein is a method of treating a subject having hematological cancer, who has received or is receiving a first CAR-expressing cell therapy, comprising:

[0116] (i) measuring soluble BCMA (sBCMA) level or activity (e.g., level) in the subject (e.g., in the serum of the subject) at at least one time point after the beginning of the first CAR-expressing cell therapy, e.g., using a method described herein, e.g., ELISA, and

[0117] (ii) (optionally) comparing the sBCMA level or activity (e.g., level) (“sample value”) at the at least one time point with a reference sBCMA level or activity (e.g., level) (“reference value”),

[0118] wherein if the sample value does not decrease from the reference value, administer a second therapy to the subject, thereby treating the subject.

[0119] In one embodiment, the reference value is a sBCMA level or activity (e.g., level) of a sample taken from the subject prior to the at least one time point (e.g., a sample taken from the subject prior to the beginning of the CAR-expressing cell therapy, or a sample taken from the subject after the beginning of the CAR-expressing cell therapy but prior to measuring the sBCMA level or activity at the at least one time point).

[0120] In one embodiment, the reference value is a sBCMA level or activity (e.g., level) of a sample taken from a different subject having hematological cancer (e.g., the same or a different hematological cancer).

[0121] In one embodiment, the reference value is an average sBCMA level or activity (e.g., level) of samples taken from a population of subjects having hematological cancer (e.g., the same or a different hematological cancer).

[0122] In one embodiment, the CAR-expressing cell therapy comprises a plurality of cells that express a CAR molecule, wherein:

[0123] (i) a decrease from the reference value to the sample value indicates that the plurality of cells that express a CAR molecule expand and/or persist in the subject; and

[0124] (ii) the absence of a decrease from the reference value to the sample value indicates that the plurality of cells that express a CAR molecule do not expand and/or persist in the subject.

[0125] In one aspect, disclosed herein is a method of treating a subject having hematological cancer, comprising:

[0126] in response to a determination that the subject, after being administered a first CAR-expressing cell therapy, has not achieved, or has not been identified as having achieved, a decrease in soluble BCMA (sBCMA) level or activity (e.g., level), e.g., in the serum of the subject, e.g., as measured by a method described herein, e.g., ELISA, administering a second therapy to the subject, thereby treating the subject.

[0127] The disclosure also features a method of monitoring a subject having responded or partially responded to a chimeric antigen receptor (CAR) cell therapy for minimal residual disease using soluble BCMA (sBCMA) as a biomarker.

[0128] In one aspect, disclosed herein is a method of monitoring cancer relapse in a subject having hematological cancer, who has responded or partially responded to a CAR-expressing cell therapy, comprising measuring soluble BCMA (sBCMA) level or activity (e.g., level) in the subject (e.g., in the serum of the subject) at at least two time points after the subject responded or partially responded to the CAR-expressing cell therapy, e.g., using a method described herein, e.g., ELISA, wherein:

[0129] (i) an increase in the sBCMA level or activity over time indicates that the cancer is relapsing;

[0130] (ii) the absence of an increase, e.g., a decrease, in the sBCMA level or activity over time indicates that the cancer is not relapsing.

[0131] In one embodiment,

[0132] (i) an increase in the sBCMA level or activity at a subsequent (e.g., second, third, fourth, fifth, sixth, or seventh or later) time point relative to a prior (e.g., first, second, third, fourth, fifth, or sixth or later) time point, among the at least two time points, indicates that the cancer is relapsing; and

[0133] (ii) the absence of an increase in the sBCMA level or activity at a subsequent (e.g., second, third, fourth, fifth, sixth, or seventh or later) time point relative to a prior (e.g., first, second, third, fourth, fifth, or sixth or later) time point, among the at least two time points, indicates that the cancer is not relapsing.

[0134] In one aspect, disclosed herein is a method of monitoring cancer relapse in a subject having hematological cancer, who has responded or partially responded to a CAR-expressing cell therapy, comprising:

[0135] (i) measuring soluble BCMA (sBCMA) level or activity (e.g., level) in the subject (e.g., in the serum of the subject) at at least one time point after the subject responded or partially responded to the CAR-expressing cell therapy, e.g., using a method described herein, e.g., ELISA, and

[0136] (ii) (optionally) comparing the sBCMA level or activity (e.g., level) (“sample value”) at the at least one time point with a reference sBCMA level or activity (e.g., level) (“reference value”), wherein:

[0137] (a) an increase from the reference value to the sample value indicates that the cancer is relapsing; and

[0138] (b) the absence of an increase from the reference value to the sample value indicates that indicates that the cancer is not relapsing.

[0139] In one embodiment, the reference value is a sBCMA level or activity (e.g., level) of a sample taken from a subject not having hematological cancer (e.g., a healthy subject). In one embodiment, the reference value is an average sBCMA level or activity (e.g., level) of samples taken from a population of subjects not having hematological cancer (e.g., healthy subjects).

[0140] In one aspect, disclosed herein is a method of treating a subject having hematological cancer, who has responded or partially responded to a first CAR-expressing cell therapy, comprising measuring soluble BCMA (sBCMA) level or activity (e.g., level) in the subject (e.g., in the serum of the subject) at at least two time points after the subject responded or partially responded to the CAR-expressing cell therapy, e.g., using a method described herein, e.g., ELISA, wherein if the sBCMA level or activity increases over time, administer a second therapy.

[0141] In one embodiment, if the sBCMA level or activity increases at a subsequent (e.g., second, third, fourth, fifth, sixth, or seventh or later) time point relative to a prior (e.g., first, second, third, fourth, fifth, or sixth or later) time point, among the at least two time points, administer a second therapy to the subject.

[0142] In one aspect, disclosed herein is a method of treating a subject having hematological cancer, who has responded or partially responded to a first CAR-expressing cell therapy, comprising:

[0143] (i) measuring soluble BCMA (sBCMA) level or activity (e.g., level) in the subject (e.g., in the serum of the subject) at at least one time point after the subject responded or partially responded to the CAR-expressing cell therapy, e.g., using a method described herein, e.g., ELISA, and

[0144] (ii) (optionally) comparing the sBCMA level or activity (e.g., level) (“sample value”) at the at least one time point with a reference sBCMA level or activity (e.g., level) (“reference value”), wherein if the sample value increases from the reference value, administer a second therapy to the subject, thereby treating the subject e, administer a second therapy.

[0145] In one embodiment, the reference value is a sBCMA level or activity (e.g., level) of a sample taken from a subject not having hematological cancer (e.g., a healthy subject). In one embodiment, the reference value is an average sBCMA level or activity (e.g., level) of samples taken from a population of subjects not having hematological cancer (e.g., healthy subjects).

[0146] In one aspect, disclosed herein is a method of treating a subject having hematological cancer, comprising:

[0147] in response to a determination that the subject, after having responded or partially responded to a first CAR-expressing cell therapy, has experienced, or has been identified as having experienced an increase in soluble BCMA (sBCMA) level or activity (e.g., level), e.g., in the serum of the subject, e.g., as measured by a method described herein, e.g., ELISA, administering a second therapy to the subject, thereby treating the subject.

[0148] In one embodiment of the preceding methods, the increase and/or decrease in soluble BCMA (sBCMA) level or activity (e.g., level) is measured by, e.g., multiplexed ELISA, single analyte ELISA, single analyte Luminex, ProteinSimple, Simoa, SomaLogic, Singulex, or Olink.

[0149] In one embodiment of the preceding methods, the second therapy comprises a B cell inhibitor. In one embodiment, the B cell inhibitor is a checkpoint inhibitor. In one embodiment, the B cell inhibitor is a second CAR-expressing cell therapy, wherein:

[0150] (i) the second CAR-expressing cell therapy is the same as the first CAR-expressing cell therapy (e.g., the second CAR-expressing cell therapy is administered at a different dose from the first CAR-expressing cell therapy); or

[0151] (ii) the second CAR-expressing cell therapy is different from the first CAR-expressing cell therapy.

[0152] In one embodiment, the preceding methods comprise discontinuing the first CAR-expressing cell therapy.

[0153] In one embodiment of the preceding methods, the CAR-expressing cell therapy, the first CAR-expressing cell therapy, or the second CAR-expressing cell therapy comprises a plurality of cells that express a CAR molecule. In some embodiments, the CAR molecule is a CAR molecule that binds to a B-cell antigen, e.g., a CD19, BCMA, CD20, CD10, CD22, CD34, CD123, FLT-3, ROR1, CD79b, CD179b, or CD79a.

[0154] In one embodiment, the CAR molecule is:

[0155] (i) a murine CAR molecule that binds to CD19, and wherein the hematological cancer is acute lymphoid leukemia (ALL);

[0156] (ii) a humanized CAR molecule that binds to CD19; or

[0157] (iii) a CAR molecule that binds to BCMA.

[0158] In embodiments of any of the preceding methods, the hematological cancer is a B cell malignancy, e.g., chosen from multiple myeloma, chronic lymphocytic leukemia, acute lymphoblastic leukemia, or non-Hodgkins lymphoma. In one embodiment, the hematological cancer is multiple myeloma.

[0159] In embodiments of any of the preceding methods, the at least one or at least two time points are determined at predetermined time intervals, e.g., at an initial phase or a maintenance phase of administration of the CAR molecule. In some embodiments, the at least one or at least two time points (e.g., the sample or reference values) are determined on a weekly basis, e.g., for the first month of CAR therapy, on a monthly basis, e.g., up to six months after initiation of the CAR therapy, or every three months, e.g., up to one, two, three or more years after initiation of the CAR therapy. In some embodiments, the at least two time points (e.g., the sample or reference values) are determined at any combination of the aforesaid time intervals, e.g., such that the first sample or time point is obtained on a weekly basis and the second sample or time point on a monthly basis. Alternatively, the first sample or time point is obtained on a monthly basis and the second sample or time point is obtained every three months, and so on.

[0160] In some embodiments, the soluble BCMA (sBCMA) level or activity (e.g., level) is measured in the subject (e.g., in the serum of the subject), e.g., once every week, e.g., for the first month after the beginning of the CAR-expressing cell therapy, once every month, e.g., up to six months after the beginning of the CAR-expressing cell therapy, or once every three months, e.g., up to one, two, three or more years after the beginning of the CAR-expressing cell therapy.

[0161] In some embodiments, the soluble BCMA (sBCMA) level or activity (e.g., level) is measured in the subject (e.g., in the serum of the subject), e.g., once every week, e.g., for the first month after the beginning of the CAR-expressing cell therapy, once every month, e.g., from the second month to the sixth month after the beginning of the CAR-expressing cell therapy, and/or once every three months, e.g., from the seventh month up to one, two, three or more years after the beginning of the CAR-expressing cell therapy.

[0162] In some embodiments, an increase in sBCMA level from the reference value or prior time point is indicative of relapse of disease, or minimal residual disease (MRD). In embodiments, an increase in sBCMA level is indicative of MRD after a B cell therapy, e.g., a CD19-targeting therapy or a BCMA-targeting therapy, in B cell malignancies.

[0163] In other aspects, the present disclosure provides a method of evaluating a subject, e.g., evaluating or monitoring the effectiveness of a CAR-expressing cell therapy in a subject, having a cancer, comprising acquiring a value of a soluble BCMA (sBCMA) level or activity in the subject, wherein said value is indicative of the subject's responsiveness or relapsing status to the CAR-expressing cell therapy, thereby evaluating the subject.

[0164] In some aspects, the present disclosure provides a CAR-expressing cell therapy, for use in the treatment of a subject that has been identified as being responsive (e.g., identified as a complete responder, partial responder or a non-relapser) to a therapy comprising a CAR-expressing cell population (e.g., a CAR19-expressing cell population or BCMA-expressing cell population), wherein said identifying comprises acquiring a value of a sBCMA level or activity in the subject.

[0165] In some aspects, the present disclosure provides a method for treating a subject having a cancer, comprising administering to the subject a therapeutically effective dose of a CAR-expressing cell therapy, if the subject is identified as being responsive (e.g., identified as a complete responder, partial responder or a non-relapser) to a therapy comprising a CAR-expressing cell population (e.g., a CAR19-expressing cell population or BCMA-expressing cell population), wherein said identifying comprises acquiring a value of a sBCMA level or activity in the subject, thereby treating the subject.

[0166] In some aspects, the present disclosure provides a method of treating a cancer in a subject, comprising:

[0167] acquiring a value of a sBCMA level or activity in the subject, wherein said value is indicative of the subject's responsiveness or relapsing status to the CAR-expressing cell therapy, and

[0168] responsive to said value, performing one, two, three, four, five, six, seven, or more (e.g., all) of:

[0169] identifying the subject as a responder (e.g., complete responder or partial responder) or non-responder, or a relapser or a non-relapser;

[0170] administering e.g., to a responder or a non-relapser, a CAR-expressing cell therapy;

[0171] administering an altered dosing of a CAR-expressing cell therapy;

[0172] altering the schedule or time course of a CAR-expressing cell therapy;

[0173] administering, e.g., to a non-responder or a partial responder, an additional agent in combination with a CAR-expressing cell therapy, e.g., a checkpoint inhibitor, e.g., a checkpoint inhibitor described herein;

[0174] administering to a non-responder or partial responder a therapy that increases the number of younger T cells or naïve T cells in the subject prior to treatment with a CAR-expressing cell therapy;

[0175] modifying a manufacturing process of a CAR-expressing cell therapy, e.g., enriching for younger T cells or naïve T cells prior to introducing a nucleic acid encoding a CAR, or increasing the transduction efficiency, e.g., for a subject identified as a non-responder or a partial responder;

[0176] administering an alternative therapy, e.g., for a non-responder or partial responder or relapser, e.g., a standard of care for a particular cancer type; or

[0177] if the subject is, or is identified as, a non-responder or a relapser, decreasing the T_{REG} cell population and/or T_{REG} gene signature, e.g., by depleting CD25 cells, or administration of cyclophosphamide, an anti-GITR antibody, an mTOR inhibitor, or a combination thereof.

[0178] The disclosure also provides, in certain aspects, a kit for providing a prognosis for success rate of a CAR-expressing cell therapy in a subject having cancer, said kit comprising:

[0179] a reagent that specifically detects the level or activity of sBCMA, and instructions for using said kit;

[0180] wherein said instructions for use provide that if one or more of the detected expression levels is different from, e.g., lower than a reference level, the subject is more likely to respond positively to a CAR-expressing cell therapy.

[0181] The disclosure also provides, in certain aspects, a system for evaluating cancer in a subject, comprising:

[0182] at least one processor operatively connected to a memory, the at least one processor when executing is configured to:

[0183] acquire a value of a sBCMA level or activity in the subject, and

[0184] responsive to a determination of the value, perform one, two, three, four, five, six, seven, or more (e.g., all) of:

[0185] identify the subject as a responder (e.g., complete responder or partial responder), non-responder, relapser or non-relapser;

[0186] recommend administering a CAR-expressing cell therapy;

[0187] recommend a selection or alteration of a dosing of a CAR-expressing cell therapy;

[0188] recommend a selection or alteration of a schedule or time course of a CAR-expressing cell therapy;

[0189] recommend administering, e.g., to a non-responder or a partial responder, an additional agent in combination with a CAR-expressing cell therapy, e.g., a checkpoint inhibitor, e.g., a checkpoint inhibitor described herein;

[0190] recommend administering to a non-responder or partial responder a therapy that increases the number of naïve T cells in the subject prior to treatment with a CAR-expressing cell therapy;

[0191] recommend modifying a manufacturing process of a CAR-expressing cell therapy, e.g., enrich for naïve T cells prior to introducing a nucleic acid encoding a CAR, e.g., for a subject identified as a non-responder or a partial responder;

[0192] recommend modifying the CAR-expressing cell product prior to infusion into the patient; recommend adjusting the CAR-expressing cell infusion dose to achieve clinical efficacy; recommend administering an alternative therapy, e.g., for a non-responder or partial responder or relapser;

[0193] recommend a selection of an alternative therapy, e.g., for a non-responder or partial responder, e.g., a standard of care for a particular cancer type; or

[0194] if the subject is, or is identified as, a non-responder or a relapser, recommend decreasing the T_{REG} cell population and/or T_{REG} gene signature, e.g., by CD25 depletion, administration of cyclophosphamide, an anti-GITR antibody, an mTOR inhibitor, or a combination thereof.

[0195] In some aspects, the present disclosure provides a method of evaluating a subject, e.g., evaluating or monitoring CRS status (e.g., the risk or level of CRS) or the effectiveness of a CAR-expressing cell therapy in a subject, having a cancer. The method comprises acquiring a value of a level or activity of one or both of APRIL or BAFF in the subject, wherein said value is indicative of the subject's CRS status, or responsiveness or relapsing status to the CAR-expressing cell therapy, thereby evaluating the subject.

[0196] In some aspects, the present disclosure provides a method of evaluating a subject, e.g., evaluating or monitoring the effectiveness of a CAR-expressing cell therapy in a subject, having a cancer, comprising acquiring a value of an anti-Sox2 antibody level or activity in the subject, wherein said value is indicative of the subject's responsiveness or relapsing status to the CAR-expressing cell therapy, thereby evaluating the subject.

[0197] In some aspects, the present disclosure provides a method of detecting Sox2 antibodies in a subject treated with a CAR-expressing cell therapy, comprising obtaining a biological sample from the subject and contacting the biological sample with an agent that binds Sox2 antibodies, and detecting binding of the agent to a Sox2 antibody.

[0198] The following embodiments can be combined with any of the aspects herein, e.g., any of the BCMA-related or Sox2-related aspects described herein, e.g., any of the BCMA-related or Sox2-related aspects above.

[0199] In embodiments, e.g., embodiments wherein sBCMA is detected, the cancer is multiple myeloma. In another embodiment wherein sBCMA is detected the cancer is a leukemia, e.g., CLL. In another embodiment wherein sBCMA is detected the cancer is ALL or NHL.

[0200] In embodiments, sBCMA is detected using an ELISA assay (e.g., multiplex or single plate), single analyte Luminex assay, ProteinSimple, Simoa, SomaLogic, Singulex, or Olink.

[0201] In embodiments, the value of sBCMA level or activity is obtained from a blood sample, e.g., a serum sample, e.g., a peripheral serum sample. In embodiments, the value of sBCMA level or activity is not obtained from a bone marrow sample. In embodiments, the method comprises obtaining a blood sample from a subject. In embodiments, the method does not comprise obtaining a bone marrow sample from the subject.

[0202] In embodiments, a responder (e.g., complete responder or partial responder, e.g., wherein the cancer is multiple myeloma or CLL) has, or is identified as having, a lower level of sBCMA compared to a reference value, e.g., a non-responder level of sBCMA.

[0203] In other embodiments, a responder (e.g., complete responder or partial responder, e.g., wherein the cancer is ALL or NHL) has, or is identified as having, a higher level of sBCMA compared to a reference value, e.g., a non-responder level of sBCMA. In embodiments, a subject having ALL or NHL has a lower level of sBCMA compared to a reference value, e.g., a level of sBCMA in a non-disease subject.

[0204] In embodiments, the CAR-expressing cell therapy is a BCMA CAR-expressing cell therapy (e.g., for treating multimple myeloma) or a CD19-expressing cell therapy (e.g., for treating multimple myeloma or CLL).

[0205] In embodiments, the method further comprises performing one, two, three, four, five, six, seven, or more (e.g., all) of:

[0206] identifying the subject as a responder (e.g., complete responder or partial responder) or non-responder, or a relapser or a non-relapser;

[0207] administering a CAR-expressing cell therapy;

[0208] administered an altered dosing of a CAR-expressing cell therapy;

[0209] altering the schedule or time course of a CAR-expressing cell therapy;

[0210] administering, e.g., to a non-responder or a partial responder, an additional agent in combination with a CAR-expressing cell therapy, e.g., a checkpoint inhibitor, e.g., a checkpoint inhibitor described herein;

[0211] administering to a non-responder or partial responder a therapy that increases the number of younger T cells in the subject prior to treatment with a CAR-expressing cell therapy;

[0212] modifying a manufacturing process of a CAR-expressing cell therapy, e.g., enriching for younger T cells prior to introducing a nucleic acid encoding a CAR, or increasing the transduction efficiency, e.g., for a subject identified as a non-responder or a partial responder;

[0213] modifying the CAR-expressing cell product prior to infusion into the patient;

[0214] adjusting the CAR-expressing cell infusion dose to achieve clinical efficacy;

[0215] administering an alternative therapy, e.g., for a non-responder or partial responder or relapser;

[0216] administering an alternative therapy, e.g., for a non-responder or partial responder, e.g., a standard of care for a particular cancer type; or

[0217] if the subject is, or is identified as, a non-responder or a relapser, decreasing the T_{REG} cell population and/or T_{REG} gene signature, e.g., by CD25 depletion, administration of cyclophosphamide, anti-GITR antibody, mTOR inhibitor, or a combination thereof.

[0218] In embodiments, the CAR-expressing cell therapy comprises a plurality of CAR-expressing immune effector cells. In embodiments, the CAR-expressing cell therapy is a CAR19 therapy (e.g., CTL019 therapy).

[0219] In embodiments, the value of sBCMA level or activity is obtained from an apheresis sample acquired from the subject, wherein optionally the apheresis sample is evaluated prior to infusion or re-infusion.

[0220] In embodiments, the subject is evaluated prior to, during, or after receiving the CAR-expressing cell therapy.

[0221] In embodiments, the subject is a human patient.

[0222] In embodiments, the method further comprises identifying the subject as a responder (e.g., a complete or partial responder), a non-responder, a relapser or a non-relapser, based on the value of sBCMA level or activity or the value of Sox2 antibody level or activity.

[0223] In embodiments, the kit comprises a reagent for detecting sBCMA protein levels, e.g., an anti-sBCMA antibody molecule.

[0224] In embodiments, Sox2 antibody level or activity is measured in a sample taken from a subject that has received at least one dose of a CAR-expressing cell therapy.

[0225] In embodiments, e.g., embodiments wherein Sox2 antibody is measured, the cancer is multiple myeloma.

[0226] In some aspects, the present disclosure provides a method of evaluating a subject, e.g., evaluating or monitoring the effectiveness of a CAR-expressing cell therapy (e.g., CD19 CAR, e.g., CTL019) in a subject, having a cancer, comprising acquiring a value of a CAR-expressing cell therapy pharmacokinetic measure in the subject, wherein the pharmacokinetic measure is selected from:

[0227] a) peak expansion of CAR-expressing cells, e.g., wherein a peak expansion of over about 3, 3.5, 4, 4.5, or 5 (and optionally up to 6) log₁₀ CAR copies/μg genomic DNA is indicative of response, e.g., CR, PR_{TD}, or PR;

[0228] b) persistence of CAR-expressing cells, e.g., wherein an AUC of over about 300, 350, 400, 450, or 500 (and optionally up to 600 or 700) log₁₀ CAR copies/μg genomic DNA over time (e.g., over 12 months) is indicative of response, e.g., CR, PR_{TD}, or PR; or

[0229] c) in vitro proliferation of CAR-expressing cells, e.g., wherein a CAR-expressing cell fold-expansion of over about 25, 30, 35, 40, 45, 50, 60, 70, 80, 90, or 100 (and optionally up to 100 or 150) fold expansion is indicative of CR, PR_{TD};

[0230] wherein said value is indicative of the subject's responsiveness or relapsing status to the CAR-expressing cell therapy, thereby evaluating the subject.

[0231] In some aspects, the present disclosure provides a method of evaluating a subject, e.g., evaluating or monitoring the effectiveness of a CAR-expressing cell therapy in a subject, having a cancer, comprising acquiring a value of a pro-apoptotic signalling molecule level or activity in the subject, wherein said value is indicative of the subject's responsiveness or relapsing status to the CAR-expressing cell therapy, thereby evaluating the subject.

### Manufacturing

[0232] In certain aspects, the disclosure provides a method of making a cell, comprising transducing an immune effector cell, e.g., a T cell or NK cell, with a vector as described herein, e.g., a vector encoding a CAR. In certain aspects, the disclosure provides a method of making a cell, comprising introducing a nucleic acid as described herein (e.g., a nucleic acid encoding a CAR) into an immune effector cell, e.g., a T cell or NK cell. In certain aspects, the disclosure provides a method of generating a population of RNA-engineered cells comprising introducing an in vitro transcribed RNA or synthetic RNA into a cell, where the RNA comprises a nucleic acid as described herein, e.g., a nucleic acid encoding a CAR.

[0233] In some embodiments, the methods of making disclosed herein further comprise contacting the population of cells, (e.g., CD19 CAR-expressing cells, CD20 CAR-expressing cells, CD22 CAR-expressing cells, B-cell inhibitor cells, or both of CD19 CAR-expressing cells and B-cell inhibitor cells), with a nucleic acid encoding a telomerase subunit, e.g., hTERT. The nucleic acid encoding the telomerase subunit can be DNA.

[0234] In some embodiments, the method of making disclosed herein further comprises culturing the population of cells, (e.g., a population of CAR-expressing cells, e.g., CD19 CAR-expressing cells, or BCMA CAR-expressing cells), in serum comprising 2% hAB serum.

[0235] In some aspects, the present disclosure provides a method of evaluating suitability for manufacturing, e.g., high or low suitability for manufacturing (e.g., predicting high manufacturing success or low manufacturing success, e.g., manufacturing fail) of a CAR-expressing cell product, e.g., CAR19-expressing cell product sample (e.g., CTL019 or CTL119), or BCMA-expressing cell product sample. The method comprises:

[0236] (1) acquiring a sample comprising immune effector cells (e.g., a whole blood sample, peripheral blood sample, or apheresis sample) from a patient having a cancer, e.g., NHL; and

[0237] (2) evaluating the suitability for manufacturing by determining, from the sample, one, two, three, four, five, six, seven, eight, nine or more (e.g., all) of:
[0238] (i) complete blood count, e.g., complete blood count with differential;
[0239] (ii) absolute lymphocyte count (ALC);
[0240] (iii) absolute monocyte count (AMC);
[0241] (iv) percent or number of lymphocytes;
[0242] (v) percent or number of neutrophils;
[0243] (vi) percent or number of CD3+CD45+ cells;
[0244] (vii) percent or number of monocytes;
[0245] (viii) percent or number of CD45 dim or CD45 negative cells;
[0246] (ix) percent or number of CD15+ and/or CXCR2+ cells; or
[0247] (x) percent or number of suppressive non-lymphoid cell, e.g., myeloid derived suppressor cells (MDSC);
[0248] wherein low levels of (i), (ii), (iii), (iv), or (vi) or high levels of (v), (vii), (viii), (ix) or (x) are indicative of low suitability for manufacturing, or
[0249] wherein high levels of (i), (ii), (iii), (iv), or (vi) or low levels of (v), (vii), (viii), (ix) or (x) are indicative of high suitability for manufacturing,
   thereby evaluating the suitability for manufacturing of the CAR-expressing cell product.

[0250] In some aspects, the present disclosure provides a method of evaluating a sample, or a method of manufacturing CAR-expressing cells, comprising:

[0251] (1) acquiring a sample comprising immune effector cells (e.g., a whole blood sample, peripheral blood sample, or apheresis sample) from a patient having a cancer, e.g., NHL; and

[0252] (2) evaluating one, two, three, four, five, six, seven, eight, nine or more (e.g., all) of:
[0253] (i) complete blood count, e.g., complete blood count with differential;
[0254] (ii) absolute lymphocyte count;
[0255] (iii) absolute monocyte count;
[0256] (iv) percent or number of lymphocytes;
[0257] (v) percent or number of neutrophils;
[0258] (vi) percent or number of CD3+CD45+ cells;
[0259] (vii) percent or number of monocytes;
[0260] (viii) percent or number of CD45 dim or CD45 negative cells;
[0261] (ix) percent or number of CD15+ and/or CXCR2+ cells; or
[0262] (x) percent or number of suppressive non-lymphoid cell, e.g., myeloid derived suppressor cells (MDSC); and

[0263] (3) optionally contacting the cell sample with a nucleic acid encoding CAR molecule, e.g., a CAR molecule described herein, e.g., a CD19 CAR or a BCMA CAR.

[0264] In embodiments of any of the manufacturing or evaluating aspects herein, low levels of (i), (ii), (iii), (iv), or (vi) or high levels of (v) or (vii), (viii), (ix) or (x) are indicative of low suitability for manufacturing.

[0265] In embodiments of any of the manufacturing or evaluating aspects herein, high levels of (i), (ii), (iii), (iv), or (vi) or low levels of (v), (vii), (viii), (ix) or (x) are indicative of high suitability for manufacturing.

[0266] In embodiments of any of the manufacturing or evaluating aspects herein, the method comprises evaluating two of (i), (ii), (iii), (iv), (v), (vi), (vii), (viii), (ix) or (x). In embodiments, the method comprises evaluating three of (i), (ii), (iii), (iv), (v), (vi), (vii), (viii), (ix) or (x). In embodiments, the method comprises evaluating four of (i), (ii), (iii), (iv), (v), (vi), (vii), (viii), (ix) or (x). In embodiments, the method comprises evaluating five of (i), (ii), (iii), (iv), (v), (vi), (vii), (viii), (ix) or (x). In embodiments, the method comprises evaluating six of (i), (ii), (iii), (iv), (v), (vi), (vii), (viii), (ix) or (x). In embodiments, the method comprises evaluating seven of (i), (ii), (iii), (iv), (v), (vi), (vii), (viii), (ix) or (x). In embodiments, the method comprises evaluating eight of (i), (ii), (iii), (iv), (v), (vi), (vii), (viii), (ix) or (x). In embodiments, the method comprises evaluating nine of (i), (ii), (iii), (iv), (v), (vi), (vii), (viii), (ix) or (x). In embodiments, the method comprises evaluating all of (i), (ii), (iii), (iv), (v), (vi), (vii), (viii), (ix) or (x).

[0267] In embodiments of any of the manufacturing or evaluating aspects herein, wherein the absolute lymphocyte count is greater than or equal to 500/ul, the sample is suitable for manufacturing, e.g., the likelihood of manufacturing success is about 93%. In embodiments, wherein the absolute lymphocyte count is <500/ul, there is a reduced suitability for manufacturing, e.g., the likelihood of manufacturing success is about 65%. In embodiments, wherein the absolute lymphocyte count is <300/ul, there is a reduced suitability for manufacturing, e.g., the likelihood of manufacturing success is about 40%. In embodiments, wherein the absolute monocyte count is <500/ul, there is a reduced suitability for manufacturing. In embodiments, wherein the percent lymphocytes is <10%, there is a reduced suitability for manufacturing. In embodiments, wherein the percent lymphocytes is <40%, there is a reduced suitability for manufacturing. In embodiments, wherein the percent neutrophils is >60%, there is a reduced suitability for manufacturing. In embodiments, wherein the percent CD3+CD45+ cells (e.g., determined by flow cytometry) is <25%, there is a reduced suitability for manufacturing. In embodiments, wherein the percent monocytes is >60%, there is a reduced suitability for manufacturing.

[0268] In embodiments of any of the manufacturing or evaluating aspects herein, a sample with high suitability for manufacturing has an at least 50%, 60%, 70%, 80%, or 90% chance of manufacturing success. In embodiments, a sample with low suitability for manufacturing has less than 50%, 40%, 30%, 20%, or 10% chance of manufacturing success. In embodiment, evaluating the likelihood of manufacturing fail comprises identifying the sample as having at least a 50%, 60%, 70%, 80%, or 90% chance of undergoing manufacturing fail. In embodiment, evaluating the likelihood of manufacturing success comprises identifying the sample as having at least a 50%, 60%, 70%, 80%, or 90% chance of undergoing manufacturing success.

[0269] In embodiments of any of the manufacturing or evaluating aspects herein, e.g., embodiments where the sample has a high suitability for manufacturing, the method further comprises manufacturing one or more CAR-expressing cells from a sample from the subject. In one embodiment, the sample is the same sample that was assayed, and in another embodiment, the sample is a different sample from the subject. In embodiments, the method further comprises contacting a cell sample from the subject with a nucleic acid encoding CAR molecule, e.g., a CAR molecule described herein, e.g., a CD19 CAR or a BCMA CAR. In embodiments the method further comprises freezing and thawing the apheresis sample. In embodiments, the method further comprises determining manufacturing fail or manufacturing success, e.g., based on cell expansion, CAR expression, or transduction efficiency. In embodiments, the method further comprises administering the manufactured cells to the subject.

[0270] In embodiments of any of the manufacturing or evaluating aspects herein, (e.g., embodiments where the sample has a low suitability for manufacturing), the method further comprises performing a second apheresis collection from the subject. In embodiments (e.g., embodiments where the sample has a low suitability for manufacturing) the method further comprises performing an enrichment, e.g., a modified enrichment, on the apheresis sample, e.g., the first or second apheresis sample. In embodiments the method further comprises freezing and thawing the apheresis sample, e.g., the first or second apheresis sample. In embodiments, the method further comprises evaluating T cell enrichment and/or decrease in suppressive non-lymphoid cells, e.g., myeloid derived suppressor cells (MDSC), e.g., after the second apheresis collection, e.g., after the enrichment or freezing and thawing, of the sample. In embodiments, a decrease in the level, e.g., percent or number, of CD45 dim or CD45 negative cells, e.g., relative to a reference sample (e.g., the first apheresis collection) is indicative of high suitability for manufacturing. In other embodiments, a decrease in the level, e.g., percent or number, of CD15-positive and/or CXCR2-positive cells, e.g., relative to a reference sample (e.g., the first apheresis collection) is indicative of high suitability for manufacturing.

[0271] In embodiments, (e.g., embodiments where the sample has a low suitability for manufacturing) the method further comprises discarding the cells in the assayed sample. In embodiments, the method further comprises manufacturing one or more CAR-expressing cells from the second apheresis sample. In embodiments, the first apheresis sample underwent manufacturing fail and the second apheresis sample underwent manufacturing success. In embodiments (e.g., embodiments where the sample has a low suitability for manufacturing), the method further comprises manufacturing one or more CAR-expressing cells from a sample from the subject. In one embodiment, the sample is the same sample that was assayed, and in another embodiment, the sample is a different sample from the subject.

[0272] In embodiments of any of the manufacturing or evaluating aspects herein, the method comprises performing or determining one or more of: complete blood count, flow cytometry phenotyping, cell size, and processing pathway on an apheresis sample.

[0273] In embodiments of any of the manufacturing or evaluating aspects herein, the method can further include performing a small scale test expansion (TE) to evaluate manufacturing proliferative capacity, e.g., one or more of cell number, cell phenotype (e.g., a cell phenotype as described herein), or transduction efficiency. In embodiments wherein the absolute lymphocyte count is <500/ul, the small scale test expansion can be used to evaluate suitability for manufacturing, e.g., high or low suitability for manufacturing. Small scale test expansion can be carried out, e.g., using the experimental conditions described in Example 37. For example, an aliquot of the apheresis sample can be obtained and cultured under small scale conditions similar to large scale manufacturing conditions.

[0274] In embodiments, a complete blood count with differential is a complete blood count that identifies the numbers or percentages of different types of blood cells, e.g., white blood cells, e.g., neutrophils, lymphocytes, monocytes, eosinophils, or basophils, in a sample.

[0275] In another aspect, the invention features a method of evaluating or monitoring the suitability of a sample (e.g., an apheresis sample or a manufactured CAR-expressing cell sample) for a CAR therapy (e.g., a CD19 CAR therapy or a BCMA CAR therapy). The method includes acquiring a value of sample suitability, wherein said value is indicative of the suitability of the CAR-expressing cell sample. In embodiments, the value of sample suitability, comprises a measure of the level or activity of a Stat3 signalling mediator (e.g., IL-6, IL-17, IL-22, IL-31, or CCL20 level or activity) in the CAR-expressing cell, wherein said value is indicative of a subject's responsiveness or relapsing status to the CAR-expressing cell, thereby evaluating the sample suitability.

[0276] In another aspect, the invention features a method of evaluating the suitability of a sample (e.g., an apheresis sample) for a CAR therapy (e.g., a CD19 CAR therapy or a BCMA CAR therapy). The method includes acquiring a value of sample suitability, wherein said value is indicative of the suitability of the CAR-expressing cell sample. In embodiments, the value of the sample suitability, comprises a measure of:

[0277] a) Ki-67 and/or granzyme B level, and

[0278] b) optionally, CD8 level,

[0279] c) optionally, CD45RO level, and/or

[0280] d) optionally, CD27 level,

[0281] wherein a Ki-67 level that is lower than a reference (e.g., lower than that in a CD8+CD45RO+CD27+ cell or population of cells) is indicative that a subject will be a CR or PR_{TD} to the CAR-expressing cell, and/or

[0282] wherein a granzyme B level that is higher than a reference (e.g., lower than that in a CD8+CD45RO+CD27+ cell or population of cells) is indicative that a subject will be a CR or PR_{TD} to the CAR-expressing cell.

[0283] In another aspect, the invention features a method of evaluating the suitability of a sample (e.g., an apheresis sample or a manufactured CAR-expressing cell sample) for a CAR therapy (e.g., a CD19 CAR therapy or a BCMA CAR therapy). The method includes acquiring a value of sample suitability, wherein said value is indicative of the suitability of the CAR-expressing cell therapy.

[0284] In embodiments, the value of sample suitability, comprises a measure of the level or activity of:

[0285] (i) CAR,

[0286] (ii) CD8, and

[0287] (iii) CD27, and/or PD1,

[0288] (e.g., CAR+CD8+CD27+PD1−) immune effector cells, e.g., in a T cell population, in a sample (e.g., an apheresis sample or a manufactured CAR-expressing cell product sample).

[0289] In some aspects, the present disclosure provides a method of evaluating a subject, e.g., evaluating or monitoring the effectiveness of a CAR-expressing cell therapy (e.g., CD19 CAR, (e.g., CTL019 or CTL119) or BCMA CAR) in a subject, having a cancer, comprising determining the persistence of the CAR-expressing cell in the subject (e.g., using qPCR or flow cytometry), wherein a persistence that is greater than a reference value (e.g., the average persistence in a NR or PD population) indicates a response, e.g., a complete response.

[0290] In embodiments, persistence is calculated by an area under the curve (AUC), e.g., AUC28 or AUC84. In embodiments (e.g., involving ALL), an AUC of above about 5×10⁵ or 1×10⁶ indicates CR. In embodiments (e.g., involving CLL), an AUC of above about 5×10⁵ or 1×10⁶ indicates CR or PR, and/or an AUC of below about 1×10⁵ or 5×10⁴ indicates NR/PD.

[0291] In embodiments, persistence is measured in the peripheral blood or bone marrow.

[0292] In embodiments, the AUC is determined at a preselected time period after administration of the CAR-expressing cell therapy. In some embodiments, the AUC is determined, e.g., between day 0 and day 45, between day 10 and day 40, between day 15 and day 35, between day 20 and day 30, or between day 0 and ending at day 25, 26, 27, 28, 29, or 30, after administration of the CAR-expressing cell therapy. In some embodiments, the AUC is determined, e.g., between day 0 and day 90, between, or between day 0 and ending at day 80, 82, 84, 85, 86, after administration of the CAR-expressing cell therapy.

[0293] Any of the aforesaid cell samples can be used in a method of treatment or medical use described herein.

### CAR Molecules

[0294] In certain embodiments, the method of treatment comprises a CAR therapy, e.g., administration of one or more cells that express one or more CAR molecules. A cell expressing one or more CAR molecules can be an immune effector cell, e.g., a T cell or NK cell. In an embodiment, the subject is a human.

[0295] In one embodiment, the cell expressing the CAR molecule comprises a vector that includes a nucleic acid sequence encoding the CAR molecule. In one embodiment, the vector is selected from the group consisting of a DNA, an RNA, a plasmid, a lentivirus vector, adenoviral vector, or a retrovirus vector. In one embodiment, the vector is a lentivirus vector. In one embodiment, the vector further comprises a promoter. In one embodiment, the promoter is an EF-1 promoter. In one embodiment, the EF-1 promoter comprises a sequence of SEQ ID NO: 100. In one embodiment, the vector is an in vitro transcribed vector, e.g., a vector that transcribes RNA of a nucleic acid molecule described herein. In one embodiment, the nucleic acid sequence in the in vitro vector further comprises a poly(A) tail, e.g., a poly A tail described herein, e.g., comprising about 150 adenosine bases. In one embodiment, the nucleic acid sequence in the in vitro vector further comprises a 3′UTR, e.g., a 3′ UTR described herein, e.g., comprising at least one repeat of a 3′UTR derived from human beta-globulin. In one embodiment, the nucleic acid sequence in the in vitro vector further comprises promoter. In one embodiment, the nucleic acid sequence comprises a T2A sequence.

[0296] In one embodiment, the cell expressing the CAR molecule is a cell described herein, e.g., a human T cell or a human NK cell, e.g., a human T cell described herein or a human NK cell described herein. In one embodiment, the human T cell is a CD8+ T cell. In one embodiment, the human T cell is a CD4+ T cell. In one embodiment, the human T cell is a CD4+/CD8+ T cell. In one embodiment the human T cell is a mixture of CD8+ and CD4+ T cells. In one embodiment, the cell is an autologous T cell. In one embodiment, the cell is an allogeneic T cell. In one embodiment, the cell is a T cell and the T cell is diacylglycerol kinase (DGK) deficient. In one embodiment, the cell is a T cell and the T cell is Ikaros deficient. In one embodiment, the cell is a T cell and the T cell is both DGK and Ikaros deficient.

[0297] In another embodiment, the cell expressing the CAR molecule, e.g., as described herein, can further express another agent, e.g., an agent which enhances the activity of a CAR-expressing cell.

[0298] In one embodiment, the method includes administering a cell expressing the CAR molecule, as described herein, in combination with an agent which enhances the activity of a CAR-expressing cell, wherein the agent is a cytokine, e.g., IL-7, IL-15, IL-21, or a combination thereof. The cytokine can be delivered in combination with, e.g., simultaneously or shortly after, administration of the CAR-expressing cell. Alternatively, the cytokine can be delivered after a prolonged period of time after administration of the CAR-expressing cell, e.g., after assessment of the subject's response to the CAR-expressing cell.

[0299] For example, in one embodiment, the agent that enhances the activity of a CAR-expressing cell can be an agent which inhibits an immune inhibitory molecule. Examples of immune inhibitory molecules include PD1, PD-L1, CTLA4, TIM3, CEACAM (e.g., CEACAM-1, CEACAM-3 and/or CEACAM-5), LAG3, VISTA, BTLA, TIGIT, LAIR1, CD160, 2B4 and TGF beta. In one embodiment, the agent that inhibits an immune inhibitory molecule comprises a first polypeptide, e.g., an inhibitory molecule, associated with a second polypeptide that provides a positive signal to the cell, e.g., an intracellular signaling domain described herein. In one embodiment, the agent comprises a first polypeptide, e.g., of an immune inhibitory molecule such as PD1, PD-L1, CTLA4, TIM3, CEACAM (e.g., CEACAM-1, CEACAM-3 and/or CEACAM-5), LAG3, VISTA, BTLA, TIGIT, LAIR1, CD160, 2B4 or TGF beta, or a fragment of any of these (e.g., at least a portion of the extracellular domain of any of these), and a second polypeptide which is an intracellular signaling domain described herein (e.g., comprising a costimulatory domain (e.g., 41BB, CD27 or CD28, e.g., as described herein) and/or a primary signaling domain (e.g., a CD3 zeta signaling domain described herein). In one embodiment, the agent comprises a first polypeptide of PD1 or a fragment thereof (e.g., at least a portion of the extracellular domain of PD1), and a second polypeptide of an intracellular signaling domain described herein (e.g., a CD28 signaling domain described herein and/or a CD3 zeta signaling domain described herein).

[0300] In one embodiment, lymphocyte infusion, for example allogeneic lymphocyte infusion, is used in the treatment of the cancer, wherein the lymphocyte infusion comprises at least one CD19 CAR-expressing cell or BCMA CAR-expressing cell described herein and optionally at least one cell expressing a CAR directed against a B-cell antigen. In one embodiment, autologous lymphocyte infusion is used in the treatment of the cancer, wherein the autologous lymphocyte infusion comprises at least one CD19-expressing cell or at least one BCMA-expressing cell, and optionally at least one cell expressing a CAR directed against a B-cell antigen.

[0301] In one embodiment, the CAR expressing cell, e.g., T cell, is administered to a subject that has received a previous stem cell transplantation, e.g., autologous stem cell transplantation, or a subject that has received a previous dose of melphalan.

[0302] In one embodiment, the cell expressing the CAR molecule, e.g., a CAR molecule described herein, is administered in combination with an agent that ameliorates one or more side effect associated with administration of a cell expressing a CAR molecule or with administration of the B-cell inhibitor, e.g., an agent described herein.

[0303] In one embodiment, the cell expressing the CAR molecule, e.g., a CD19 CAR or BCMA CAR molecule described herein, and the B-cell inhibitor are administered in combination with an additional agent that treats the disease associated with CD19, e.g., an additional agent described herein.

[0304] In one embodiment, the cells expressing a CAR molecule, e.g., a CAR molecule described herein, are administered at a dose and/or dosing schedule described herein.

[0305] In one embodiment, the CAR molecule is introduced into T cells, e.g., using in vitro transcription, and the subject (e.g., human) receives an initial administration of cells comprising a CAR molecule, and one or more subsequent administrations of cells comprising a CAR molecule, wherein the one or more subsequent administrations are administered less than 15 days, e.g., 14, 13, 12, 11, 10, 9, 8, 7, 6, 5, 4, 3, or 2 days after the previous administration. In one embodiment, more than one administration of cells comprising a CAR molecule are administered to the subject (e.g., human) per week, e.g., 2, 3, or 4 administrations of cells comprising a CAR molecule are administered per week. In one embodiment, the subject (e.g., human subject) receives more than one administration of cells comprising a CAR molecule per week (e.g., 2, 3 or 4 administrations per week) (also referred to herein as a cycle), followed by a week of no administration of cells comprising a CAR molecule, and then one or more additional administration of cells comprising a CAR molecule (e.g., more than one administration of the cells comprising a CAR molecule per week) is administered to the subject. In another embodiment, the subject (e.g., human subject) receives more than one cycle of cells comprising a CAR molecule, and the time between each cycle is less than 10, 9, 8, 7, 6, 5, 4, or 3 days. In one embodiment, the cells comprising a CAR molecule are administered every other day for 3 administrations per week. In one embodiment, the cells comprising a CAR molecule are administered for at least two, three, four, five, six, seven, eight or more weeks.

[0306] In one embodiment, a population of cells described herein is administered. In some embodiments the population of cells is isolated or purified.

[0307] In one embodiment, the 4-1BB costimulatory domain comprises a sequence of SEQ ID NO: 16. In one embodiment, the 4-1BB costimulatory domain comprises an amino acid sequence having at least one, two or three modifications (e.g., substitutions) but not more than 20, 10 or 5 modifications (e.g., substitutions) of an amino acid sequence of SEQ ID NO: 16, or a sequence with at least 95%, e.g., 95-99%, identity to an amino acid sequence of SEQ ID NO:16. In one embodiment, the 4-1BB costimulatory domain is encoded by a nucleic acid sequence of SEQ ID NO:60, or a sequence with at least 95%, e.g., 95-99%, identity thereof.

[0308] In one embodiment, the CD27 costimulatory domain comprises a sequence of SEQ ID NO: 16. In one embodiment, the CD27 costimulatory domain comprises an amino acid sequence having at least one, two or three modifications (e.g., substitutions) but not more than 20, 10 or 5 modifications (e.g., substitutions) of an amino acid sequence of SEQ ID NO: 16, or a sequence with 95-99% identity to an amino acid sequence of SEQ ID NO:16. In one embodiment, the CD27 costimulatory domain is encoded by a nucleic acid sequence of SEQ ID NO:17, or a sequence with at least 95%, e.g., 95-99%, identity thereof.

[0309] In one embodiment, the CD28 costimulatory domain comprises a sequence of SEQ ID NO: 1317. In one embodiment, the CD28 costimulatory domain comprises an amino acid sequence having at least one, two or three modifications (e.g., substitutions) but not more than 20, 10 or 5 modifications (e.g., substitutions) of an amino acid sequence of SEQ ID NO: 1317, or a sequence with at least 95%, e.g., 95-99%, identity to an amino acid sequence of SEQ ID NO:1317. In one embodiment, the CD28 costimulatory domain is encoded by a nucleic acid sequence of SEQ ID NO:1318, or a sequence with at least 95%, e.g., 95-99%, identity thereof.

[0310] In one embodiment, the wild-type ICOS costimulatory domain comprises a sequence of SEQ ID NO: 1319. In one embodiment, the wild-type ICOS costimulatory domain comprises an amino acid sequence having at least one, two or three modifications (e.g., substitutions) but not more than 20, 10 or 5 modifications (e.g., substitutions) of an amino acid sequence of SEQ ID NO: 1319, or a sequence with at least 95%, e.g., 95-99%, identity to an amino acid sequence of SEQ ID NO: 1319. In one embodiment, the wild-type ICOS costimulatory domain is encoded by a nucleic acid sequence of SEQ ID NO: 1320, or a sequence with at least 95%, e.g., 95-99%, identity thereof.

[0311] In one embodiment, the Y to F mutant ICOS costimulatory domain comprises a sequence of SEQ ID NO: 1321. In one embodiment, the Y to F mutant ICOS costimulatory domain comprises an amino acid sequence having at least one, two or three modifications (e.g., substitutions) but not more than 20, 10 or 5 modifications (e.g., substitutions) of an amino acid sequence of SEQ ID NO: 1321, or a sequence with at least 95%, e.g., 95-99%, identity to an amino acid sequence of SEQ ID NO: 1321. In one embodiment, the Y to F mutant ICOS costimulatory domain is encoded by a nucleic acid sequence with at least 95%, e.g., 95-99%, identity to a nucleic acid sequence of SEQ ID NO:1320 (wherein SEQ ID NO: 1320 encodes wild-type ICOS).

[0312] In embodiments, the primary signaling domain comprises a functional signaling domain of CD3 zeta. In embodiments, the functional signaling domain of CD3 zeta comprises SEQ ID NO: 17 (mutant CD3 zeta) or SEQ ID NO: 43 (wild-type human CD3 zeta).

[0313] In one embodiment, the method includes administering a population of cells wherein at least one cell in the population expresses a CAR, e.g., having an anti-CD19 domain described herein, and an agent which enhances the activity of a CAR-expressing cell, e.g., a second cell expressing the agent which enhances the activity of a CAR-expressing cell. For example, in one embodiment, the agent can be an agent which inhibits an immune inhibitory molecule. Examples of immune inhibitory molecules include PD1, PD-L1, CTLA4, TIM3, CEACAM (e.g., CEACAM-1, CEACAM-3 and/or CEACAM-5), LAG3, VISTA, BTLA, TIGIT, LAIR1, CD160, 2B4 and TGF beta. In one embodiment, the agent that inhibits an immune inhibitory molecule comprises a first polypeptide, e.g., an inhibitory molecule, associated with a second polypeptide that provides a positive signal to the cell, e.g., an intracellular signaling domain described herein. In one embodiment, the agent comprises a first polypeptide, e.g., of an inhibitory molecule such as PD1, PD-L1, CTLA4, TIM3, CEACAM (e.g., CEACAM-1, CEACAM-3 and/or CEACAM-5), LAG3, VISTA, BTLA, TIGIT, LAIR1, CD160, 2B4 or TGF beta, or a fragment of any of these (e.g., at least a portion of an extracellular domain of any of these), and a second polypeptide which is an intracellular signaling domain described herein (e.g., comprising a costimulatory domain (e.g., 41BB, CD27 or CD28, e.g., as described herein) and/or a primary signaling domain (e.g., a CD3 zeta signaling domain described herein). In one embodiment, the agent comprises a first polypeptide of PD1 or a fragment thereof (e.g., at least a portion of the extracellular domain of PD1), and a second polypeptide of an intracellular signaling domain described herein (e.g., a CD28 signaling domain described herein and/or a CD3 zeta signaling domain described herein).

[0314] In an embodiment, the method further comprises transplanting a cell, e.g., a hematopoietic stem cell, or a bone marrow, into the mammal.

[0315] In one embodiment, the method includes administering a population of cells comprising a CAR described herein, e.g., a CAR having an anti-CD19 domain described herein, and an agent which enhances the activity of a CAR-expressing cell, wherein the agent is a cytokine, e.g., IL-7, IL-15, IL-21, or a combination thereof. The cytokine can be delivered in combination with, e.g., simultaneously or shortly after, administration of the CAR-expressing cell(s). Alternatively, the cytokine can be delivered after a prolonged period of time after administration of the CAR-expressing cell(s), e.g., after assessment of the subject's response to the CAR-expressing cell(s). Related compositions for use and methods of making a medicament are also provided.

[0316] In an embodiment, the composition is a pharmaceutically acceptable composition.

[0317] In some embodiment, the CAR molecules described herein include a binding domain, e.g., a CD19- or BCMA-binding domain as described herein.

[0318] In one embodiment, the CAR molecule comprises a transmembrane domain of a protein selected from the group consisting of the alpha, beta or zeta chain of the T-cell receptor, CD28, CD3 epsilon, CD45, CD4, CD5, CD8, CD9, CD16, CD22, CD33, CD37, CD64, CD80, CD86, CD134, CD137 and CD154. In one embodiment, the transmembrane domain comprises a sequence of SEQ ID NO: 15. In one embodiment, the transmembrane domain comprises an amino acid sequence having at least one, two or three modifications (e.g., substitutions) but not more than 20, 10 or 5 modifications (e.g., substitutions) of an amino acid sequence of SEQ ID NO: 15, or a sequence with 95-99% identity to an amino acid sequence of SEQ ID NO: 15.

[0319] In one embodiment, the binding domain is connected to the transmembrane domain by a hinge region, e.g., a hinge region described herein. In one embodiment, the encoded hinge region comprises SEQ ID NO:14 or SEQ ID NO:45, or a sequence with 95-99% identity thereof.

[0320] In one embodiment, the CAR molecule further comprises a sequence encoding a costimulatory domain, e.g., a costimulatory domain described herein. In one embodiment, the costimulatory domain comprises a functional signaling domain of a protein selected from the group consisting of OX40, CD2, CD27, CD28, CDS, ICAM-1, LFA-1 (CD11a/CD18), ICOS (CD278), and 4-1BB (CD137). In one embodiment, the costimulatory domain comprises a sequence of SEQ ID NO: 16. In one embodiment, the costimulatory domain comprises a sequence of SEQ ID NO:51. In one embodiment, the costimulatory domain comprises an amino acid sequence having at least one, two or three modifications (e.g., substitutions) but not more than 20, 10 or 5 modifications (e.g., substitutions) of an amino acid sequence of SEQ ID NO: 16 or SEQ ID NO:51, or a sequence with at least 95%, e.g., 95-99%, identity to an amino acid sequence of SEQ ID NO: 16 or SEQ ID NO:51. In one embodiment, the costimulatory domain comprises a functional signaling domain of a protein selected from the group consisting of MHC class I molecule, TNF receptor proteins, Immunoglobulin-like proteins, cytokine receptors, integrins, signaling lymphocytic activation molecules (SLAM proteins), activating NK cell receptors, BTLA, a Toll ligand receptor, OX40, CD2, CD7, CD27, CD28, CD30, CD40, CDS, ICAM-1, LFA-1 (CD11a/CD18), 4-1BB (CD137), B7-H3, CDS, ICAM-1, ICOS (CD278), GITR, BAFFR, LIGHT, HVEM (LIGHTR), KIRDS2, SLAMF7, NKp80 (KLRF1), NKp44, NKp30, NKp46, CD19, CD4, CD8alpha, CD8beta, IL2R beta, IL2R gamma, IL7R alpha, ITGA4, VLA1, CD49a, ITGA4, IA4, CD49D, ITGA6, VLA-6, CD49f, ITGAD, CD11d, ITGAE, CD103, ITGAL, CD11a, LFA-1, ITGAM, CD11b, ITGAX, CD11c, ITGB1, CD29, ITGB2, CD18, LFA-1, ITGB7, NKG2D, NKG2C, TNFR2, TRANCE/RANKL, DNAM1 (CD226), SLAMF4 (CD244, 2B4), CD84, CD96 (Tactile), CEACAM1, CRTAM, Ly9 (CD229), CD160 (BY55), PSGL1, CD100 (SEMA4D), CD69, SLAMF6 (NTB-A, Ly108), SLAM (SLAMF1, CD150, IPO-3), BLAME (SLAMF8), SELPLG (CD162), LTBR, LAT, GADS, SLP-76, PAG/Cbp, CD19a, and a ligand that specifically binds with CD83. In embodiments, the costimulatory domain comprises 4-1BB, CD27, CD28, or ICOS.

[0321] In one embodiment, the CAR molecule further comprises a sequence encoding an intracellular signaling domain, e.g., an intracellular signaling domain described herein. In one embodiment, the intracellular signaling domain comprises a functional signaling domain of 4-1BB and/or a functional signaling domain of CD3 zeta. In one embodiment, the intracellular signaling domain comprises the sequence of SEQ ID NO: 16 and/or the sequence of SEQ ID NO:17. In one embodiment, the intracellular signaling domain comprises the sequence of SEQ ID NO:16 and/or the sequence of SEQ ID NO:43. In one embodiment, the intracellular signaling domain comprises a functional signaling domain of CD27 and/or a functional signaling domain of CD3 zeta. In one embodiment, the intracellular signaling domain comprises the sequence of SEQ ID NO: 51 and/or the sequence of SEQ ID NO:17. In one embodiment, the intracellular signaling domain comprises the sequence of SEQ ID NO:51 and/or the sequence of SEQ ID NO:43. In one embodiment, the intracellular signaling domain comprises an amino acid sequence having at least one, two or three modifications (e.g., substitutions) but not more than 20, 10 or 5 modifications (e.g., substitutions) of an amino acid sequence of SEQ ID NO:16 or SEQ ID NO:51 and/or an amino acid sequence of SEQ ID NO:17 or SEQ ID NO:43, or a sequence with at least 95%, e.g., 95-99%, identity to an amino acid sequence of SEQ ID NO:16 or SEQ ID NO:51 and/or an amino acid sequence of SEQ ID NO:17 or SEQ ID NO:43. In one embodiment, the intracellular signaling domain comprises the sequence of SEQ ID NO:16 or SEQ ID NO:51 and the sequence of SEQ ID NO: 17 or SEQ ID NO:43, wherein the sequences comprising the intracellular signaling domain are expressed in the same frame and as a single polypeptide chain.

[0322] In one embodiment, the CAR molecule further comprises a leader sequence, e.g., a leader sequence described herein. In one embodiment, the leader sequence comprises an amino acid sequence of SEQ ID NO: 13, or a sequence with 95-99% identity to an amino acid sequence of SEQ ID NO:13.

[0323] In one aspect, the CAR (e.g., a CD19 CAR or a BCMA CAR) comprises an optional leader sequence (e.g., an optional leader sequence described herein), an extracellular antigen binding domain, a hinge (e.g., hinge described herein), a transmembrane domain (e.g., transmembrane domain described herein), and an intracellular stimulatory domain (e.g., intracellular stimulatory domain described herein). In one aspect an exemplary CAR construct comprises an optional leader sequence (e.g., a leader sequence described herein), an extracellular antigen binding domain, a hinge, a transmembrane domain, an intracellular costimulatory domain (e.g., an intracellular costimulatory domain described herein) and an intracellular stimulatory domain.

[0324] CAR which comprises a transmembrane domain that comprises a transmembrane domain of a protein selected from the group consisting of the alpha, beta or zeta chain of the T-cell receptor, CD28, CD3 epsilon, CD45, CD4, CD5, CD8, CD9, CD16, CD22, CD33, CD37, CD64, CD80, CD86, CD134, CD137 and CD154. In embodiments, the antigen binding domain is connected to the transmembrane domain by a hinge region. In embodiments, the hinge region comprises SEQ ID NO:14, or a sequence with 95-99% identity thereof. In embodiments, the costimulatory domain is a functional signaling domain obtained from a protein selected from the group consisting of OX40, CD2, CD27, CD28, CDS, ICAM-1, LFA-1 (CD11a/CD18), ICOS (CD278), and 4-1BB (CD137). In embodiments, the costimulatory domain is a functional signaling domain obtained from a protein selected from the group consisting of MHC class I molecule, TNF receptor proteins, Immunoglobulin-like proteins, cytokine receptors, integrins, signaling lymphocytic activation molecules (SLAM proteins), activating NK cell receptors, BTLA, a Toll ligand receptor, OX40, CD2, CD7, CD27, CD28, CD30, CD40, CDS, ICAM-1, LFA-1 (CD11a/CD18), 4-1BB (CD137), B7-H3, CDS, ICAM-1, ICOS (CD278), GITR, BAFFR, LIGHT, HVEM (LIGHTR), KIRDS2, SLAMF7, NKp80 (KLRF1), NKp44, NKp30, NKp46, CD19, CD4, CD8alpha, CD8beta, IL2R beta, IL2R gamma, IL7R alpha, ITGA4, VLA1, CD49a, ITGA4, IA4, CD49D, ITGA6, VLA-6, CD49f, ITGAD, CD11d, ITGAE, CD103, ITGAL, CD11a, LFA-1, ITGAM, CD11b, ITGAX, CD11c, ITGB1, CD29, ITGB2, CD18, LFA-1, ITGB7, NKG2D, NKG2C, TNFR2, TRANCE/RANKL, DNAM1 (CD226), SLAMF4 (CD244, 2B4), CD84, CD96 (Tactile), CEACAM1, CRTAM, Ly9 (CD229), CD160 (BY55), PSGL1, CD100 (SEMA4D), CD69, SLAMF6 (NTB-A, Ly108), SLAM (SLAMF1, CD150, IPO-3), BLAME (SLAMF8), SELPLG (CD162), LTBR, LAT, GADS, SLP-76, PAG/Cbp, CD19a, and a ligand that specifically binds with CD83. In embodiments, the costimulatory domain comprises a sequence of SEQ ID NO:16 or SEQ ID NO:51. In embodiments, the intracellular signaling domain comprises a functional signaling domain of 4-1BB and/or a functional signaling domain of CD3 zeta.

[0325] In embodiments, the intracellular signaling domain comprises the sequence of SEQ ID NO: 16 and/or the sequence of SEQ ID NO:17 or SEQ ID NO:43. In embodiments, the CAR further comprises a leader sequence. In embodiments, the leader sequence comprises SEQ ID NO: 13.

[0326] In embodiments, the cells that express the CAR molecule comprise T cells or NK cells.

### CD19 Inhibitors

[0327] In embodiments, the CD19 inhibitor is a small molecule, an antibody, a fragment of an antibody, or a cell therapy, e.g., a cell that expresses a CAR molecule comprising an anti-CD19 binding domain.

[0328] In one embodiment, the cell expresses a CAR molecule comprising an anti-CD19 binding domain (e.g., a murine or humanized antibody or antibody fragment that specifically binds to CD19), a transmembrane domain, and an intracellular signaling domain (e.g., an intracellular signaling domain comprising a costimulatory domain and/or a primary signaling domain). In one embodiment, the CAR comprises an antibody or antibody fragment which includes an anti-CD19 binding domain described herein (e.g., a murine or humanized antibody or antibody fragment that specifically binds to CD19 as described herein), a transmembrane domain described herein, and an intracellular signaling domain described herein (e.g., an intracellular signaling domain comprising a costimulatory domain and/or a primary signaling domain described herein).

[0329] In one embodiment, the CAR molecule comprises an anti-CD19 binding domain comprising one or more (e.g., all three) light chain complementary determining region 1 (LC CDR1), light chain complementary determining region 2 (LC CDR2), and light chain complementary determining region 3 (LC CDR3) of an anti-CD19 binding domain described herein, and one or more (e.g., all three) heavy chain complementary determining region 1 (HC CDR1), heavy chain complementary determining region 2 (HC CDR2), and heavy chain complementary determining region 3 (HC CDR3) of an anti-CD19 binding domain described herein, e.g., an anti-CD19 binding domain comprising one or more, e.g., all three, LC CDRs and one or more, e.g., all three, HC CDRs. In one embodiment, the anti-CD19 binding domain comprises one or more (e.g., all three) heavy chain complementary determining region 1 (HC CDR1), heavy chain complementary determining region 2 (HC CDR2), and heavy chain complementary determining region 3 (HC CDR3) of an anti-CD19 binding domain described herein, e.g., the anti-CD19 binding domain has two variable heavy chain regions, each comprising a HC CDR1, a HC CDR2 and a HC CDR3 described herein. In one embodiment, the anti-CD19 binding domain comprises a murine light chain variable region described herein (e.g., in Table 3) and/or a murine heavy chain variable region described herein (e.g., in Table 3). In one embodiment, the anti-CD19 binding domain is a scFv comprising a murine light chain and a murine heavy chain of an amino acid sequence of Table 3. In an embodiment, the anti-CD19 binding domain (e.g., an scFv) comprises: a light chain variable region comprising an amino acid sequence having at least one, two or three modifications (e.g., substitutions) but not more than 30, 20 or 10 modifications (e.g., substitutions) of an amino acid sequence of a light chain variable region provided in Table 3, or a sequence with at least 95%, e.g., 95-99%, identity with an amino acid sequence of Table 3; and/or a heavy chain variable region comprising an amino acid sequence having at least one, two or three modifications (e.g., substitutions) but not more than 30, 20 or 10 modifications (e.g., substitutions) of an amino acid sequence of a heavy chain variable region provided in Table 3, or a sequence with 95-99% identity to an amino acid sequence of Table 3. In one embodiment, the anti-CD19 binding domain comprises a sequence of SEQ ID NO:59, or a sequence with at least 95%, e.g., 95-99%, identity thereof. In one embodiment, the anti-CD19 binding domain is a scFv, and a light chain variable region comprising an amino acid sequence described herein, e.g., in Table 3, is attached to a heavy chain variable region comprising an amino acid sequence described herein, e.g., in Table 3, via a linker, e.g., a linker described herein. In one embodiment, the anti-CD19 binding domain includes a (Gly₄-Ser)n linker, wherein n is 1, 2, 3, 4, 5, or 6, e.g., 3 or 4 (SEQ ID NO: 53). The light chain variable region and heavy chain variable region of a scFv can be, e.g., in any of the following orientations: light chain variable region-linker-heavy chain variable region or heavy chain variable region-linker-light chain variable region.

[0330] In one embodiment, the CAR molecule comprises a humanized anti-CD19 binding domain that includes one or more (e.g., all three) light chain complementary determining region 1 (LC CDR1), light chain complementary determining region 2 (LC CDR2), and light chain complementary determining region 3 (LC CDR3) of a humanized anti-CD19 binding domain described herein, and one or more (e.g., all three) heavy chain complementary determining region 1 (HC CDR1), heavy chain complementary determining region 2 (HC CDR2), and heavy chain complementary determining region 3 (HC CDR3) of a humanized anti-CD19 binding domain described herein, e.g., a humanized anti-CD19 binding domain comprising one or more, e.g., all three, LC CDRs and one or more, e.g., all three, HC CDRs. In one embodiment, the humanized anti-CD19 binding domain comprises at least HC CDR2. In one embodiment, the humanized anti-CD19 binding domain comprises one or more (e.g., all three) heavy chain complementary determining region 1 (HC CDR1), heavy chain complementary determining region 2 (HC CDR2), and heavy chain complementary determining region 3 (HC CDR3) of a humanized anti-CD19 binding domain described herein, e.g., the humanized anti-CD19 binding domain has two variable heavy chain regions, each comprising a HC CDR1, a HC CDR2 and a HC CDR3 described herein. In one embodiment, the humanized anti-CD19 binding domain comprises at least HC CDR2. In one embodiment, the light chain variable region comprises one, two, three or all four framework regions of VK3_L25 germline sequence. In one embodiment, the light chain variable region has a modification (e.g., substitution, e.g., a substitution of one or more amino acid found in the corresponding position in the murine light chain variable region of SEQ ID NO: 58, e.g., a substitution at one or more of positions 71 and 87). In one embodiment, the heavy chain variable region comprises one, two, three or all four framework regions of VH4_4-59 germline sequence. In one embodiment, the heavy chain variable region has a modification (e.g., substitution, e.g., a substitution of one or more amino acid found in the corresponding position in the murine heavy chain variable region of SEQ ID NO: 58, e.g., a substitution at one or more of positions 71, 73 and 78). In one embodiment, the humanized anti-CD19 binding domain comprises a light chain variable region described herein (e.g., in Table 2) and/or a heavy chain variable region described herein (e.g., in Table 2). In one embodiment, the humanized anti-CD19 binding domain is a scFv comprising a light chain and a heavy chain of an amino acid sequence of Table 2. In an embodiment, the humanized anti-CD19 binding domain (e.g., an scFv) comprises: a light chain variable region comprising an amino acid sequence having at least one, two or three modifications (e.g., substitutions) but not more than 30, 20 or 10 modifications (e.g., substitutions) of an amino acid sequence of a light chain variable region provided in Table 2, or a sequence with at least 95%, e.g., 95-99%, identity with an amino acid sequence of Table 2; and/or a heavy chain variable region comprising an amino acid sequence having at least one, two or three modifications (e.g., substitutions) but not more than 30, 20 or 10 modifications (e.g., substitutions) of an amino acid sequence of a heavy chain variable region provided in Table 2, or a sequence with at least 95%, e.g., 95-99%, identity to an amino acid sequence of Table 2. In one embodiment, the humanized anti-CD19 binding domain comprises a sequence selected from a group consisting of SEQ ID NO:1, SEQ ID NO:2, SEQ ID NO:3, SEQ ID NO: 4, SEQ ID NO:5, SEQ ID NO:6, SEQ ID NO:7, SEQ ID NO:8, SEQ ID NO:9, SEQ ID NO:10, SEQ ID NO:11 and SEQ ID NO:12, or a sequence with 95-99% identity thereof. In one embodiment, the humanized anti-CD19 binding domain is a scFv, and a light chain variable region comprising an amino acid sequence described herein, e.g., in Table 2, is attached to a heavy chain variable region comprising an amino acid sequence described herein, e.g., in Table 2, via a linker, e.g., a linker described herein. In one embodiment, the humanized anti-CD19 binding domain includes a (Gly4-Ser)n linker, wherein n is 1, 2, 3, 4, 5, or 6, e.g., 3 or 4 (SEQ ID NO: 53). The light chain variable region and heavy chain variable region of a scFv can be, e.g., in any of the following orientations: light chain variable region-linker-heavy chain variable region or heavy chain variable region-linker-light chain variable region.

[0331] In one embodiment of the preceding methods, the murine CAR molecule that binds to CD19 comprises:

[0332] (i) one or more of (e.g., all three of) heavy chain complementary determining region 1 (HCDR1), HCDR2, and HCDR3 of any CD19 scFv domain amino acid sequence listed in Table 3 and one or more of (e.g., all three of) light chain complementary determining region 1 (LCDR1), LCDR2, and LCDR3 of any CD19 scFv domain amino acid sequence listed in Table 3,

[0333] (ii) a heavy chain variable region (VH) of any CD19 scFv domain amino acid sequence listed in Table 3 and a light chain variable region (VL) of any CD19 scFv domain amino acid sequence listed in Table 3,

[0334] (iii) a CD19 scFv domain amino acid sequence listed in Table 3 (e.g., SEQ ID NO: 59, 109, 111, or 114), or

[0335] (iv) a full-length CD19 CAR amino acid sequence listed in Table 3 (e.g., SEQ ID NO: 110, 112, 113, or 115, or residues 22-486 of SEQ ID NO: 58).

[0336] In one embodiment of the preceding methods, the humanized CAR molecule that binds to CD19 comprises:

[0337] (i) one or more of (e.g., all three of) heavy chain complementary determining region 1 (HCDR1), HCDR2, and HCDR3 of any CD19 scFv domain amino acid sequence listed in Table 2 and one or more of (e.g., all three of) light chain complementary determining region 1 (LCDR1), LCDR2, and LCDR3 of any CD19 scFv domain amino acid sequence listed in Table 2,

[0338] (ii) a heavy chain variable region (VH) of any CD19 scFv domain amino acid sequence listed in Table 2 and a light chain variable region (VL) of any CD19 scFv domain amino acid sequence listed in Table 2,

[0339] (iii) a CD19 scFv domain amino acid sequence listed in Table 2 (e.g., any one of SEQ ID NOs: 1-12), or

[0340] (iv) a full-length CD19 CAR amino acid sequence listed in Table 2 (e.g., residues 22-486 of any one of SEQ ID NOs: 31-34 or 42, or residues 22-491 of any one of SEQ ID NOs: 35-41). In one embodiment, the CAR molecule comprises an anti-CD19 binding domain that includes one or more (e.g., 2, 3, 4, 5, or 6) LC CDR1, LC CDR2, LC CDR3, HC CDR1, HC CDR2, and HC CDR3 of a construct of Table 4 and 5, e.g., murine_CART19, humanized_CART19 a, humanized_CART19 b, or humanized_CART19 c.

[0341] In one embodiment, the CAR molecule comprises a leader sequence, e.g., a leader sequence described herein, e.g., a leader sequence of SEQ ID NO: 13, or having 95-99% identity thereof; an anti-CD19 binding domain described herein, e.g., an anti-CD19 binding domain comprising a LC CDR1, a LC CDR2, a LC CDR3, a HC CDR1, a HC CDR2 and a HC CDR3 described herein, e.g., a murine anti-CD19 binding domain described in Table 3, e.g., CTL019, a humanized anti-CD19 binding domain described in Table 2, e.g., CTL119, or a sequence with at least 95%, e.g., 95-99%, identity thereof; a hinge region, e.g., a hinge region described herein, e.g., a hinge region of SEQ ID NO:14 or having at least 95%, e.g., 95-99%, identity thereof; a transmembrane domain, e.g., a transmembrane domain described herein, e.g., a transmembrane domain having a sequence of SEQ ID NO:15 or a sequence having at least 95%, e.g., 95-99%, identity thereof; an intracellular signaling domain, e.g., an intracellular signaling domain described herein (e.g., an intracellular signaling domain comprising a costimulatory domain and/or a primary signaling domain). In one embodiment, the intracellular signaling domain comprises a costimulatory domain, e.g., a costimulatory domain described herein, e.g., a 4-1BB costimulatory domain having a sequence of SEQ ID NO:16 or SEQ ID NO:51, or having at least 95%, e.g., 95-99%, identity thereof, and/or a primary signaling domain, e.g., a primary signaling domain described herein, e.g., a CD3 zeta stimulatory domain having a sequence of SEQ ID NO:17 or SEQ ID NO:43, or having at least 95%, e.g., 95-99%, identity thereof.

[0342] In one embodiment, the CAR molecule comprises (e.g., consists of) an amino acid sequence of SEQ ID NO:58, SEQ ID NO:31, SEQ ID NO:32, SEQ ID NO:33, SEQ ID NO:34, SEQ ID NO:35, SEQ ID NO:36, SEQ ID NO:37, SEQ ID NO:38, SEQ ID NO:39, SEQ ID NO:40, SEQ ID NO:41 or SEQ ID NO:42, or an amino acid sequence having at least one, two, three, four, five, 10, 15, 20 or 30 modifications (e.g., substitutions) but not more than 60, 50 or 40 modifications (e.g., substitutions) of an amino acid sequence of SEQ ID NO:58, SEQ ID NO:31, SEQ ID NO:32, SEQ ID NO:33, SEQ ID NO:34, SEQ ID NO:35, SEQ ID NO:36, SEQ ID NO:37, SEQ ID NO:38, SEQ ID NO:39, SEQ ID NO:40, SEQ ID NO:41 or SEQ ID NO:42, or an amino acid sequence having 85%, 90%, 95%, 96%, 97%, 98% or 99% identity to an amino acid sequence of SEQ ID NO:58, SEQ ID NO:31, SEQ ID NO:32, SEQ ID NO:33, SEQ ID NO:34, SEQ ID NO:35, SEQ ID NO:36, SEQ ID NO:37, SEQ ID NO:38, SEQ ID NO:39, SEQ ID NO:40, SEQ ID NO:41 or SEQ ID NO:42.

[0343] In some embodiments, the CD19 inhibitor comprises an antibody molecule having, e.g., an antibody molecule having a CD19-binding sequence as described herein. For instance, the antibody molecule may comprise CDRs or a VH and VL as described in any of Tables 2, 3, 4, and 5, or a sequence with homology thereto, e.g., having at least 95%, e.g., 95-99%, identity thereto. The antibody molecule may comprise a CD19-binding region having a sequence described in this section, e.g., in the context of a CAR.

[0344] In some embodiments, the CD19 inhibitor, e.g., the CD19 CAR, can be used to treat a hematological malignancy. In embodiments, the CD19 inhibitor, e.g., the CD19 CAR, can be used to treat a disease associated with CD19 expression.

[0345] In one embodiment, the disease associated with CD19 expression is selected from a proliferative disease such as a cancer or malignancy or a precancerous condition such as a myelodysplasia, a myelodysplastic syndrome or a preleukemia, or is a non-cancer related indication associated with expression of CD19. In one embodiment, the disease is a solid or a liquid tumor. In one embodiment, the cancer is a pancreatic cancer. In one embodiment, the disease is a hematologic cancer. In one embodiment, the hematologic cancer is a leukemia. In one embodiment, the cancer is selected from the group consisting of one or more acute leukemias including but not limited to B-cell acute lymphoid leukemia (BALL), T-cell acute lymphoid leukemia (TALL), small lymphocytic leukemia (SLL), acute lymphoid leukemia (ALL) (e.g., relapsing and refractory ALL); one or more chronic leukemias including but not limited to chronic myelogenous leukemia (CML), and chronic lymphocytic leukemia (CLL). Additional hematologic cancers or conditions include, but are not limited to mantle cell lymphoma (MCL), B cell prolymphocytic leukemia, blastic plasmacytoid dendritic cell neoplasm, Burkitt's lymphoma, diffuse large B cell lymphoma, follicular lymphoma, hairy cell leukemia, small cell- or a large cell-follicular lymphoma, malignant lymphoproliferative conditions, MALT lymphoma, Marginal zone lymphoma, multiple myeloma, myelodysplasia and myelodysplastic syndrome, non-Hodgkin lymphoma, Hodgkin lymphoma, plasmablastic lymphoma, plasmacytoid dendritic cell neoplasm, Waldenstrom macroglobulinemia, and “preleukemia.” Preleukemia encompasses a diverse collection of hematological conditions united by ineffective production (or dysplasia) of myeloid blood cells In embodiments, a disease associated with CD19 expression include, but not limited to atypical and/or non-classical cancers, malignancies, precancerous conditions or proliferative diseases expressing CD19; and any combination thereof.

[0346] In one embodiment, the disease associated with expression of CD19 is a lymphoma, e.g., MCL or Hodgkin lymphoma. In one embodiment, the disease associated with expression of CD19 is leukemia, e.g., SLL, CLL and/or ALL.

[0347] In an embodiment, the subject (e.g., a subject to be treated with a CD19 CAR, optionally in combination with a second agent such as a PD1 inhibitor or PD-L1 inhibitor) has, or is identified as having, at least 5%, 6%, 7%, 8%, 9%, 10%, 20%, 30%, 40%, 50%, 60%, 70%, 80%, or 90% of cancer cells, e.g., DLBCL cells, which are CD3+/PD1+.

[0348] In an embodiment, the subject has relapsed or is identified as having relapsed after treatment with the one or more cells that express a CAR molecule that binds CD19, e.g., a CD19 CAR. In an embodiment, the subject has relapsed or is identified as having relapsed based on one or more of reappearance of blasts in the blood, bone marrow (>5%), or any extramedullary site, after a complete response. In an embodiment, the subject has relapsed or is identified as having relapsed based on detection of CD19-blasts above a predetermined threshold, e.g., over 1%, 2%, 3%, 4%, 5%, or 10%.

### BCMA Inhibitors

[0349] In embodiments the BCMA CAR comprises an anti-BCMA binding domain (e.g., human or humanized anti-BCMA binding domain), a transmembrane domain, and an intracellular signaling domain, and wherein said anti-BCMA binding domain comprises a heavy chain complementary determining region 1 (HC CDR1), a heavy chain complementary determining region 2 (HC CDR2), and a heavy chain complementary determining region 3 (HC CDR3) of any anti-BMCA heavy chain binding domain amino acid sequences listed in Table 4D or 4E. In embodiments, the anti-BCMA binding domain comprises a light chain variable region described herein (e.g., in Table 4D or 4E) and/or a heavy chain variable region described herein (e.g., in Table 4D or 4E). In some embodiments, the CDRs are defined according to the Kabat numbering scheme, the Chothia numbering scheme, or a combination thereof.

[0350] In one embodiment of the preceding methods, the CAR molecule that binds to BCMA comprises:

[0351] (i) one or more of (e.g., all three of) heavy chain complementary determining region 1 (HCDR1), HCDR2, and HCDR3 of any CD19 scFv domain amino acid sequence listed in Table 4D or 4E and one or more of (e.g., all three of) light chain complementary determining region 1 (LCDR1), LCDR2, and LCDR3 of any CD19 scFv domain amino acid sequence listed in Table 4D or 4E,

[0352] (ii) a heavy chain variable region (VH) listed in Table 4D or 4E and a light chain variable region (VL) listed in Table 4D or 4E,

[0353] (iii) a BCMA scFv domain amino acid sequence listed in Table 4D or 4E (e.g., any one of SEQ ID NOs: 1400, 1406, 1412, 1418, 1424, 1430, 1436, 1442, 1448, 1454, 1460, 1466, 1472, 1478, 1485, 1491, 1497, 1503, 1509, 1515, 1521, 1527, 1533, 1539, 1545, 1551, 1557, 1563, 1569, 1575, 1581, 1587, 1593, 1599, 1605, 1611, 1619, 1623, 1627, or 1631), or

[0354] (iv) a full-length BCMA CAR amino acid sequence listed in Table 4D or 4E (e.g., residues 22-483 of SEQ ID NO: 1404, residues 22-490 of SEQ ID NO: 1410, residues 22-488 of SEQ ID NO: 1416, residues 22-487 of SEQ ID NO: 1422, residues 22-493 of SEQ ID NO: 1428, residues 22-490 of SEQ ID NO: 1434, residues 22-491 of SEQ ID NO: 1440, residues 22-482 of SEQ ID NO: 1446, residues 22-483 of SEQ ID NO: 1452, residues 22-485 of SEQ ID NO: 1458, residues 22-483 of SEQ ID NO: 1464, residues 22-490 of SEQ ID NO: 1470, residues 22-483 of SEQ ID NO: 1476, residues 22-484 of SEQ ID NO: 1483, residues 22-485 of SEQ ID NO: 1489, residues 22-487 of SEQ ID NO: 1495, residues 23-489 of SEQ ID NO: 1501, residues 22-490 of SEQ ID NO: 1507, residues 22-484 of SEQ ID NO: 1513, residues 22-485 of SEQ ID NO: 1519, residues 22-489 of SEQ ID NO: 1525, residues 22-497 of SEQ ID NO: 1531, residues 22-492 of SEQ ID NO: 1537, residues 22-490 of SEQ ID NO: 1543, residues 22-485 of SEQ ID NO: 1549, residues 22-492 of SEQ ID NO: 1555, residues 22-492 of SEQ ID NO: 1561, residues 22-483 of SEQ ID NO: 1567, residues 22-490 of SEQ ID NO: 1573, residues 22-485 of SEQ ID NO: 1579, residues 22-486 of SEQ ID NO: 1585, residues 22-492 of SEQ ID NO: 1591, residues 22-488 of SEQ ID NO: 1597, residues 22-488 of SEQ ID NO: 1603, residues 22-495 of SEQ ID NO: 1609, residues 22-490 of SEQ ID NO: 1615, SEQ ID NO: 1620, SEQ ID NO: 1624, SEQ ID NO: 1628, or SEQ ID NO: 1632).

[0355] In one embodiment of the preceding methods, the CAR molecule comprises:

[0356] (i) an scFv;

[0357] (ii) a transmembrane domain that comprises a transmembrane domain of a protein selected from the group consisting of the alpha, beta or zeta chain of the T-cell receptor, CD28, CD3 epsilon, CD45, CD4, CD5, CD8, CD9, CD16, CD22, CD33, CD37, CD64, CD80, CD86, CD134, CD137 and CD154;

[0358] (iii) a hinge region comprising SEQ ID NO:14, or a sequence with 95-99% identity thereof;

[0359] (iv) a costimulatory domain that is a functional signaling domain obtained from a protein selected from the group consisting of OX40, CD2, CD27, CD28, CDS, ICAM-1, LFA-1 (CD11a/CD18), ICOS (CD278), and 4-1BB (CD137), wherein optionally the costimulatory domain comprises the amino acid sequence of SEQ ID NO:16 or 51;

[0360] (v) an intracellular signaling domain comprising a functional signaling domain of 4-1BB and/or a functional signaling domain of CD3 zeta; e.g., an intracellular signaling domain comprising the sequence of SEQ ID NO: 16 and/or the sequence of SEQ ID NO:17 or 43; or (vi) a leader sequence, optionally wherein the leader sequence comprises the amino acid sequence of SEQ ID NO: 13.

[0361] In one embodiment, the BCMA CAR-expressing cell comprises a nucleic acid encoding a CAR molecule, wherein the CAR molecule comprises an anti-BCMA binding domain, a transmembrane domain, and an intracellular signaling domain.

[0362] In one embodiment, the encoded anti-BCMA binding domain comprises:

[0363] a heavy chain variable region (VH) comprising a heavy chain complementarity determining region 1 (VHCDR1), a VHCDR2, and a VHCDR3 of any anti-BCMA heavy chain binding domain amino acid sequence listed in Tables 4D, 4E, 4G, 4I, and 4F (or a sequence at least about 85%, 90%, 95%, 99% or more identical thereto, and/or having one, two, three or more substitutions, insertions or deletions, e.g., conserved substitutions), and/or a light chain variable region (VL) comprising a light chain complementarity determining region 1 (VLCDR1), a VLCDR2, and a VLCDR3 of any anti-BCMA light chain binding domain amino acid sequence listed in Tables 4D, 4E, 4H 4J, and 4F (or a sequence at least about 85%, 90%, 95%, 99% or more identical thereto, and/or having one, two, three or more substitutions, insertions or deletions, e.g., conserved substitutions).

[0364] Additional heavy chain variable domain CDR sequences according to the Chothia numbering scheme are described in Table 22 on page 100 of WO/2016/014565, filed 21 Jul. 2015. Additional light chain variable domain CDR sequences according to the Chothia numbering scheme are described in Table 23 on pages 101-102 of WO/2016/014565, filed 21 Jul. 2015.

[0365] In one embodiment, the encoded anti-BCMA binding domain comprises:

[0366] a VH comprising a VH of any anti-BCMA heavy chain binding domain amino acid sequence listed in Tables 4D, 4E, and 4F (or a sequence at least about 85%, 90%, 95%, 99% or more identical thereto, and/or having one, two, three or more substitutions, insertions or deletions, e.g., conserved substitutions), and/or

[0367] a VL comprising a VL of any anti-BCMA light chain binding domain amino acid sequence listed in Tables 4D, 4E, and 4F (or a sequence at least about 85%, 90%, 95%, 99% or more identical thereto, and/or having one, two, three or more substitutions, insertions or deletions, e.g., conserved substitutions).

[0368] In one embodiment, the encoded anti-BCMA binding domain comprises an scFv comprising an scFv amino acid sequence listed in Tables 4D and 4E (or a sequence at least about 85%, 90%, 95%, 99% or more identical thereto, and/or having one, two, three or more substitutions, insertions or deletions, e.g., conserved substitutions).

[0369] In one embodiment, the encoded anti-BCMA binding domain comprises an scFv comprising a VH, a VL, and a linker, wherein the linker comprises the amino acid sequence of

(SEQ ID NO: 3200)
GGGGSGGGGSGGGGSGGGGS.

[0370] In one embodiment, the encoded anti-BCMA binding domain comprises an amino acid sequence selected from the group consisting of SEQ ID NOs: 1400, 1406, 1412, 1418, 1424, 1430, 1436, 1442, 1448, 1454, 1460, 1466, 1472, 1478, 1485, 1491, 1497, 1503, 1509, 1515, 1521, 1527, 1533, 1539, 1545, 1551, 1557, 1563, 1569, 1575, 1581, 1587, 1593, 1599, 1605, 1611, 1619, 1623, 1627, or 1631 or a sequence with at least 95%, e.g., 95-99%, identity thereof.

[0371] In one embodiment, the nucleic acid encoding the anti-BCMA binding domain comprises a nucleotide sequence selected from the group consisting of SEQ ID NO: 1407, SEQ ID NO: 1413, SEQ ID NO: 1419, SEQ ID NO: 1425, SEQ ID NO: 1431, SEQ ID NO: 1437, SEQ ID NO: 1443., SEQ ID NO: 1449, SEQ ID NO: 1455, SEQ ID NO: 1461, SEQ ID NO: 1401, SEQ ID NO: 1467, SEQ ID NO: 1473, SEQ ID NO: 1480, SEQ ID NO: 1486, SEQ ID NO: 1492, SEQ ID NO: 1498, SEQ ID NO: 1504, SEQ ID NO: 1510, SEQ ID NO: 1516, SEQ ID NO: 1522, SEQ ID NO: 1528, SEQ ID NO: 1534, SEQ ID NO: 1540, SEQ ID NO: 1546, SEQ ID NO: 1552, SEQ ID NO: 1558, SEQ ID NO: 1564, SEQ ID NO: 1570, SEQ ID NO: 1576, SEQ ID NO: 1582, SEQ ID NO: 1588, SEQ ID NO: 1594, SEQ ID NO: 1600, SEQ ID NO: 1606, SEQ ID NO: 1612, or a sequence with at least 95%, e.g., 95-99%, identity thereof.

[0372] In one embodiment, the encoded CAR molecule comprises a full CAR amino acid sequence listed in Tables 4D and 4E (or a sequence at least about 85%, 90%, 95%, 99% or more identical thereto, and/or having one, two, three or more substitutions, insertions or deletions, e.g., conserved substitutions).

[0373] In one embodiment, the encoded CAR molecule comprises an amino acid sequence selected from the group consisting of residues 22-483 of SEQ ID NO: 1404, residues 22-490 of SEQ ID NO: 1410, residues 22-488 of SEQ ID NO: 1416, residues 22-487 of SEQ ID NO: 1422, residues 22-493 of SEQ ID NO: 1428, residues 22-490 of SEQ ID NO: 1434, residues 22-491 of SEQ ID NO: 1440, residues 22-482 of SEQ ID NO: 1446, residues 22-483 of SEQ ID NO: 1452, residues 22-485 of SEQ ID NO: 1458, residues 22-483 of SEQ ID NO: 1464, residues 22-490 of SEQ ID NO: 1470, residues 22-483 of SEQ ID NO: 1476, residues 22-484 of SEQ ID NO: 1483, residues 22-485 of SEQ ID NO: 1489, residues 22-487 of SEQ ID NO: 1495, residues 23-489 of SEQ ID NO: 1501, residues 22-490 of SEQ ID NO: 1507, residues 22-484 of SEQ ID NO: 1513, residues 22-485 of SEQ ID NO: 1519, residues 22-489 of SEQ ID NO: 1525, residues 22-497 of SEQ ID NO: 1531, residues 22-492 of SEQ ID NO: 1537, residues 22-490 of SEQ ID NO: 1543, residues 22-485 of SEQ ID NO: 1549, residues 22-492 of SEQ ID NO: 1555, residues 22-492 of SEQ ID NO: 1561, residues 22-483 of SEQ ID NO: 1567, residues 22-490 of SEQ ID NO: 1573, residues 22-485 of SEQ ID NO: 1579, residues 22-486 of SEQ ID NO: 1585, residues 22-492 of SEQ ID NO: 1591, residues 22-488 of SEQ ID NO: 1597, residues 22-488 of SEQ ID NO: 1603, residues 22-495 of SEQ ID NO: 1609, residues 22-490 of SEQ ID NO: 1615, SEQ ID NO: 1620, SEQ ID NO: 1624, SEQ ID NO: 1628, or SEQ ID NO: 1632, or a sequence with at least 95%, e.g., 95-99%, identity thereof.

[0374] In one embodiment, the nucleic acid encoding the CAR molecule comprises a nucleotide sequence listed in Table 4D, or a sequence with at least 95%, e.g., 95-99%, identity thereof.

[0375] In one embodiment, the nucleic acid encoding the CAR molecule comprises a nucleotide sequence selected from the group consisting of SEQ ID NO: 1405, SEQ ID NO: 1411, SEQ ID NO: 1417, SEQ ID NO: 1423, SEQ ID NO: 1429, SEQ ID NO: 1435, SEQ ID NO: 1441, SEQ ID NO: 1447, SEQ ID NO: 1453, SEQ ID NO: 1459, SEQ ID NO: 1465, SEQ ID NO: 1471, SEQ ID NO: 1477, SEQ ID NO: 1484, SEQ ID NO: 1490, SEQ ID NO: 1496, SEQ ID NO: 1502, SEQ ID NO: 1508, SEQ ID NO: 1514, SEQ ID NO: 1520, SEQ ID NO: 1526, SEQ ID NO: 1532, SEQ ID NO: 1538, SEQ ID NO: 1544, SEQ ID NO: 1550, SEQ ID NO: 1556, SEQ ID NO: 1562, SEQ ID NO: 1568, SEQ ID NO: 1574, SEQ ID NO: 1580, SEQ ID NO: 1586, SEQ ID NO: 1592, SEQ ID NO: 1598, SEQ ID NO: 1604, SEQ ID NO: 1610, and SEQ ID NO: 1616, or a sequence with at least 95%, e.g., 95-99%, identity thereof.

[0376] In one embodiment, the encoded transmembrane domain comprises a transmembrane domain of a protein selected from the group consisting of the alpha, beta or zeta chain of a T-cell receptor, CD28, CD3 epsilon, CD45, CD4, CD5, CD8, CD9, CD16, CD22, CD33, CD37, CD64, CD80, CD86, CD134, CD137 and CD154.

[0377] In one embodiment, the encoded transmembrane domain comprises the amino acid sequence of SEQ ID NO: 15 (or a sequence at least about 85%, 90%, 95%, 99% or more identical thereto, and/or having one, two, three or more substitutions, insertions or deletions, e.g., conserved substitutions).

[0378] In one embodiment, the nucleic acid encoding the CAR molecule comprises the nucleotide sequence of SEQ ID NO: 56, or a sequence with 95-99% identity thereof.

[0379] In one embodiment, the encoded anti-BCMA binding domain is connected to the transmembrane domain by a hinge region.

[0380] In one embodiment, the encoded hinge region comprises the amino acid sequence of SEQ ID NO: 14 or 102 (or a sequence at least about 85%, 90%, 95%, 99% or more identical thereto, and/or having one, two, three or more substitutions, insertions or deletions, e.g., conserved substitutions).

[0381] In one embodiment, the nucleic acid encoding the CAR molecule comprises the nucleotide sequence of SEQ ID NO: 55 or 103, or a sequence with 95-99% identity thereof.

[0382] In one embodiment, the encoded intracellular signaling domain is a functional signaling domain obtained from a protein chosen from an MHC class I molecule, a TNF receptor, an immunoglobulin-like protein, a cytokine receptor, integrin, signaling lymphocytic activation molecule (SLAM), an activating NK cell receptor, BTLA, a Toll ligand receptor, CD3, OX40, CD2, CD7, CD27, CD28, CD30, CD40, CDS, ICAM-1, LFA-1 (CD11a/CD18), 4-1BB (CD137), B7-H3, CDS, ICAM-1, ICOS (CD278), GITR, BAFFR, LIGHT, HVEM (LIGHTR), KIRDS2, SLAMF7, NKp80 (KLRF1), NKp44, NKp30, NKp46, CD19, CD4, CD8alpha, CD8beta, IL2R beta, IL2R gamma, IL7R alpha, ITGA4, VLA1, CD49a, ITGA4, IA4, CD49D, ITGA6, VLA-6, CD49f, ITGAD, CD11d, ITGAE, CD103, ITGAL, CD11a, LFA-1, ITGAM, CD11b, ITGAX, CD11c, ITGB1, CD29, ITGB2, CD18, LFA-1, ITGB7, NKG2D, NKG2C, TNFR2, TRANCE/RANKL, DNAM1 (CD226), SLAMF4 (CD244, 2B4), CD84, CD96 (Tactile), CEACAM1, CRTAM, Ly9 (CD229), CD160 (BY55), PSGL1, CD100 (SEMA4D), CD69, SLAMF6 (NTB-A, Ly108), SLAM (SLAMF1, CD150, IPO-3), BLAME (SLAMF8), SELPLG (CD162), LTBR, LAT, GADS, SLP-76, PAG/Cbp, CD19a, or a ligand that specifically binds with CD83.

[0383] In one embodiment, the encoded intracellular signaling domain is a functional signaling domain of a protein chosen from 4-1BB, CD3 zeta, CD28, or ICOS.

[0384] In one embodiment, the encoded intracellular signaling domain comprises the amino acid sequence of SEQ ID NO: 16, 17, 43, 1317, or 1319 (or a sequence at least about 85%, 90%, 95%, 99% or more identical thereto, and/or having one, two, three or more substitutions, insertions or deletions, e.g., conserved substitutions).

[0385] In one embodiment, the nucleic acid molecule encoding the CAR molecule comprises the nucleotide sequence of SEQ ID NO: 60, 101, 44, 1318, or 1320, or a sequence with 95-99% identity thereof.

[0386] In one embodiment, the nucleic acid encoding the CAR molecule comprises:

[0387] (i) a leader sequence encoding the amino acid sequence of SEQ ID NO: 13 (or a sequence at least about 85%, 90%, 95%, 99% or more identical thereto, and/or having one, two, three or more substitutions, insertions or deletions, e.g., conserved substitutions); or

[0388] (ii) the nucleotide sequence of SEQ ID NO: 54, or a sequence with 95-99% identity thereof.

[0389] In one embodiment, the nucleic acid encoding the CAR molecule is a DNA molecule, optionally wherein the DNA molecule is transcribed under an EF-1 promoter comprising the sequence of SEQ ID NO: 100.

[0390] In one embodiment, the cell is an autologous cell or an allogeneic cell.

[0391] In one embodiment, the cell is a T cell or a natural killer (NK) cell.

[0392] In some embodiments, the BCMA inhibitor, e.g., the BCMA CAR, can be used to treat a hematological malignancy. In embodiments, the BCMA inhibitor, e.g., the BCMA CAR, can be used to treat a disease associated with BCMA expression.

[0393] In one embodiment, the disease associated with expression of BCMA is:

[0394] (i) a cancer or malignancy, or a precancerous condition chosen from one or more of a myelodysplasia, a myelodysplastic syndrome or a preleukemia, or

[0395] (ii) a non-cancer related indication associated with expression of BCMA.

[0396] In one embodiment, the disease is chosen from acute leukemia, B-cell acute lymphoid leukemia (BALL), T-cell acute lymphoid leukemia (TALL), acute lymphoid leukemia (ALL), chronic myelogenous leukemia (CML), chronic lymphocytic leukemia (CLL), B cell prolymphocytic leukemia, blastic plasmacytoid dendritic cell neoplasm, Burkitt's lymphoma, diffuse large B cell lymphoma, follicular lymphoma, hairy cell leukemia, small cell- or large cell-follicular lymphoma, a malignant lymphoproliferative condition, mucosa associated lymphoid tissue (MALT) lymphoma, mantle cell lymphoma, marginal zone lymphoma, multiple myeloma, myelodysplasia and myelodysplastic syndrome, non-Hodgkin's lymphoma, plasmablastic lymphoma, plasmacytoid dendritic cell neoplasm, Waldenstrom macroglobulinemia, a plasma cell proliferative disorder (e.g., asymptomatic myeloma (smoldering multiple myeloma or indolent myeloma), monoclonal gammapathy of undetermined significance (MGUS), Waldenstrom's macroglobulinemia, plasmacytomas (e.g., plasma cell dyscrasia, solitary myeloma, solitary plasmacytoma, extramedullary plasmacytoma, and multiple plasmacytoma), systemic amyloid light chain amyloidosis, and POEMS syndrome (also known as Crow-Fukase syndrome, Takatsuki disease, and PEP syndrome)), prostate cancer (e.g., castrate-resistant or therapy-resistant prostate cancer, or metastatic prostate cancer), pancreatic cancer, or lung cancer.

[0397] In one embodiment, the disease is a hematologic cancer. In one embodiment, the disease is multiple myeloma. In one embodiment, the disease is CD19-negative multiple myeloma.

[0398] In embodiments, the compositions disclosed herein (e.g., nucleic acids, vectors, or cells) are for use as a medicament.

[0399] In embodiments, the compositions disclosed herein are used in the treatment of a hematological cancer.

[0400] In embodiments, the compositions disclosed herein are used in the treatment of a disease associated with expression of a B-cell antigen (e.g., CD19), e.g., a B-cell leukemia or lymphoma (e.g., a CD19-associated disease).

[0401] In other embodiments, the compositions disclosed herein are used in the treatment of a disease associated with expression of a BCMA antigen (e.g., CD19), e.g., a BCMA-associated disease.

[0402] Unless otherwise defined, all technical and scientific terms used herein have the same meaning as commonly understood by one of ordinary skill in the art to which this invention belongs. Although methods and materials similar or equivalent to those described herein can be used in the practice or testing of the present invention, suitable methods and materials are described below. All publications, patent applications, patents, and other references mentioned herein (e.g., sequence database reference numbers) are incorporated by reference in their entirety. For example, all GenBank, Unigene, and Entrez sequences referred to herein, e.g., in any Table herein, are incorporated by reference. Unless otherwise specified, the sequence accession numbers specified herein, including in any Table herein, refer to the database entries current as of Apr. 8, 2015. When one gene or protein references a plurality of sequence accession numbers, all of the sequence variants are encompassed.

[0403] In addition, the materials, methods, and examples are illustrative only and not intended to be limiting.

[0404] Headings, sub-headings or numbered or lettered elements, e.g., (a), (b), (i) etc, are presented merely for ease of reading. The use of headings or numbered or lettered elements in this document does not require the steps or elements be performed in alphabetical order or that the steps or elements are necessarily discrete from one another.

[0405] Other features, objects, and advantages of the invention will be apparent from the description and drawings, and from the claims.

### BRIEF DESCRIPTION OF THE DRAWINGS

[0406] FIGS. 1A and 1B are Kaplan-Meier plots showing overall survival (FIG. 76A) and relapse-free survival (FIG. 76B) of ALL patients treated with CTL019.

[0407] FIG. 2 is a time course depicting serum IL-6 levels, CSF IL-6 levels, patient temperature, and CART-BCMA frequency in a patient experiencing CRS.

[0408] FIG. 3 shows levels of sBCMA, BAFF and APRIL in longitudinal serum samples from 6 UPCC14415 patients after CAR-BCMA infusion.

[0409] FIG. 4 shows levels of serum sBCMA (right Y axis, squares) correlated with CAR-BCMA marking (left Y axis, circles) in peripheral blood DNA from 6 UPCC14415 patients over time after CAR-BCMA infusion.

[0410] FIGS. 5A-5C show sBCMA levels in patient samples. FIG. 5A shows levels of serum sBCMA (right Y axis, squares) correlated with CAR-19 marking (left Y axis, circles) in peripheral blood DNA from 6 UPCC02413 patients over time after CAR-19 infusion. Dotted line is sBCMA in normal donor sera (see FIG. 81). FIG. 5B shows levels of serum sBCMA (right Y axis, squares) correlated with CAR-19 marking (left Y axis, circles) in peripheral blood DNA from 4 UPCC02413 patients over time after CAR-19 infusion. FIG. 5C shows levels of serum sBCMA (right Y axis, squares) correlated with CAR-19 marking (left Y axis, circles) in peripheral blood DNA from a UPCC019413 patient (single-patient compassionate-use protocol) over time after CAR-19 infusion.

[0411] FIG. 6 shows Sox2 antibody levels in patients treated with CTL019. Left panel shows anti-sox2 antibodies in patients 1, 2, 5, 7, 8, 9, 10, and 12. The right panel shows patient 1 samples tested using 1:400, 1:800, or 1:1200 dilutions.

[0412] FIG. 7 is a set of graphs showing peak expansion, persistence, and in vitro proliferation in the indicated patient populations, and proliferation in vitro vs in vivo expansion.

[0413] FIG. 8 is a set of graphs showing levels of STAT3 signaling mediators and targets in the indicated patient populations.

[0414] FIG. 9 shows the response of relapsed refractory Acute Lymphocytic Leukemia (ALL) pediatric patients with CNS involvement to CTL019 therapy.

[0415] FIGS. 10A-10B show the absolute count (FIG. 10A) and percentages of lymphocytes (FIG. 10B) in the peripheral blood from NHL patients whose cells were used for CAR T manufacturing.

[0416] FIGS. 11A-11C show the CD45, lymphocyte and monocyte profiles in apheresis samples from for each patient grouped by success or failure of CAR T manufacturing. CD3+CD45+ FACS staining data is shown in FIG. 11A. FIG. 11B shows percent lymphocytes, as determined by a multisizer and FIG. 11C shows percent monocytes in the samples, as determined by a multisizer.

[0417] FIGS. 12A-12D show growth curves of fresh vs. thawed cells from samples that failed the first CAR T manufacturing attempt.

[0418] FIGS. 13A-13B show CD45 vs. CD3 flow cytometry dot plots of fresh and thawed cells from two patient samples. FIG. 13A shows data from sample 41 and FIG. 13B shows data from sample 26.

[0419] FIGS. 14A-14B show CD15 vs. CD14 (top panels) and CXCR2 vs. CD14 (bottom panels) flow cytometry dot plots of fresh and thawed cells from two patient samples. FIG. 14A shows data from sample 54 and FIG. 14B shows data from sample 58.

[0420] FIGS. 15A-15B show dose response logistic regression analyses for patients treated with autologous CTL019.

### DETAILED DESCRIPTION

### Definitions

[0421] Unless defined otherwise, all technical and scientific terms used herein have the same meaning as commonly understood by one of ordinary skill in the art to which the invention pertains.

[0422] The term “a” and “an” refers to one or to more than one (i.e., to at least one) of the grammatical object of the article. By way of example, “an element” means one element or more than one element.

[0423] The term “about” when referring to a measurable value such as an amount, a temporal duration, and the like, is meant to encompass variations of ±20% or in some instances ±10%, or in some instances ±5%, or in some instances ±1%, or in some instances ±0.1% from the specified value, as such variations are appropriate to perform the disclosed methods.

[0424] The term “apheresis” as used herein refers to the art-recognized extracorporeal process by which the blood of a donor or patient is removed from the donor or patient and passed through an apparatus that separates out selected particular constituent(s) and returns the remainder to the circulation of the donor or patient, e.g., by retransfusion. Thus, “an apheresis sample” refers to a sample obtained using apheresis.

[0425] The term “bioequivalent” refers to an amount of an agent other than the reference compound (e.g., RAD001), required to produce an effect equivalent to the effect produced by the reference dose or reference amount of the reference compound (e.g., RAD001). In an embodiment the effect is the level of mTOR inhibition, e.g., as measured by P70 S6 kinase inhibition, e.g., as evaluated in an in vivo or in vitro assay, e.g., as measured by an assay described herein, e.g., the Boulay assay, or measurement of phosphorylated S6 levels by western blot. In an embodiment, the effect is alteration of the ratio of PD-1 positive/PD-1 negative T cells, as measured by cell sorting. In an embodiment a bioequivalent amount or dose of an mTOR inhibitor is the amount or dose that achieves the same level of P70 S6 kinase inhibition as does the reference dose or reference amount of a reference compound. In an embodiment, a bioequivalent amount or dose of an mTOR inhibitor is the amount or dose that achieves the same level of alteration in the ratio of PD-1 positive/PD-1 negative T cells as does the reference dose or reference amount of a reference compound.

[0426] The term “inhibition” or “inhibitor” includes a reduction in a certain parameter, e.g., an activity, of a given molecule, e.g., CD20, CD19, or BCMA. For example, inhibition of an activity, e.g., an activity of CD19, of at least 5%, 10%, 20%, 30%, 40%, or more is included by this term. Thus, inhibition need not be 100%. Activities for the inhibitors can be determined as described herein or by assays known in the art. A “B-cell inhibitor” is a molecule, e.g., a small molecule, antibody, CAR or cell comprising a CAR, which causes the reduction in a certain parameter, e.g., an activity, e.g., growth or proliferation, of a B-cell, or which causes a reduction in a certain parameter, e.g., an activity, of a molecule associated with a B cell. Non-limiting examples of molecules associated with a B cell include proteins expressed on the surface of B cells, e.g., CD19, CD20, CD10, CD22, CD34, CD123, FLT-3, ROR1, CD79b, CD179b, CD79a, or BCMA.

[0427] The term “Chimeric Antigen Receptor” or alternatively a “CAR” refers to a set of polypeptides, typically two in the simplest embodiments, which when in an immune effector cell, provides the cell with specificity for a target cell, typically a cancer cell, and with intracellular signal generation. In some embodiments, a CAR comprises at least an extracellular antigen binding domain, a transmembrane domain and a cytoplasmic signaling domain (also referred to herein as “an intracellular signaling domain”) comprising a functional signaling domain derived from a stimulatory molecule and/or costimulatory molecule as defined below. In some embodiments, the set of polypeptides are in the same polypeptide chain, e.g., comprise a chimeric fusion protein. In some embodiments, the set of polypeptides are not contiguous with each other, e.g., are in different polypeptide chains. In some embodiments, the set of polypeptides include a dimerization switch that, upon the presence of a dimerization molecule, can couple the polypeptides to one another, e.g., can couple an antigen binding domain to an intracellular signaling domain. In one aspect, the stimulatory molecule of the CAR is the zeta chain associated with the T cell receptor complex (e.g., CD3 zeta). In one aspect, the cytoplasmic signaling domain comprises a primary signaling domain (e.g., a primary signaling domain of CD3-zeta).

[0428] In one aspect, the cytoplasmic signaling domain further comprises one or more functional signaling domains derived from at least one costimulatory molecule as defined below. In one aspect, the costimulatory molecule is chosen from the costimulatory molecules described herein, e.g., 4-1BB (i.e., CD137), CD27, and/or CD28. In one aspect, the CAR comprises a chimeric fusion protein comprising an extracellular antigen binding domain, a transmembrane domain and an intracellular signaling domain comprising a functional signaling domain derived from a stimulatory molecule. In one aspect, the CAR comprises a chimeric fusion protein comprising an extracellular antigen binding domain, a transmembrane domain and an intracellular signaling domain comprising a functional signaling domain derived from a costimulatory molecule and a functional signaling domain derived from a stimulatory molecule. In one aspect, the CAR comprises a chimeric fusion protein comprising an extracellular antigen binding domain, a transmembrane domain and an intracellular signaling domain comprising two functional signaling domains derived from one or more costimulatory molecule(s) and a functional signaling domain derived from a stimulatory molecule. In one aspect, the CAR comprises a chimeric fusion protein comprising an extracellular antigen binding domain, a transmembrane domain and an intracellular signaling domain comprising at least two functional signaling domains derived from one or more costimulatory molecule(s) and a functional signaling domain derived from a stimulatory molecule. In one aspect the CAR comprises an optional leader sequence at the amino-terminus (N-ter) of the CAR fusion protein. In one aspect, the CAR further comprises a leader sequence at the N-terminus of the extracellular antigen binding domain, wherein the leader sequence is optionally cleaved from the antigen binding domain (e.g., a scFv) during cellular processing and localization of the CAR to the cellular membrane.

[0429] As used herein, unless otherwise specified, the terms “prevent,” “preventing” and “prevention” refer to an action that occurs before the subject begins to suffer from the condition, or relapse of the condition. Prevention need not result in a complete prevention of the condition; partial prevention or reduction of the condition or a symptom of the condition, or reduction of the risk of developing the condition, is encompassed by this term.

[0430] Administered “in combination”, as used herein, means that two (or more) different treatments are delivered to the subject during the course of the subject's affliction with the disorder, e.g., the two or more treatments are delivered after the subject has been diagnosed with the disorder and before the disorder has been cured or eliminated or treatment has ceased for other reasons. In some embodiments, the delivery of one treatment is still occurring when the delivery of the second begins, so that there is overlap in terms of administration. This is sometimes referred to herein as “simultaneous” or “concurrent delivery”. In other embodiments, the delivery of one treatment ends before the delivery of the other treatment begins. In some embodiments of either case, the treatment is more effective because of combined administration. For example, the second treatment is more effective, e.g., an equivalent effect is seen with less of the second treatment, or the second treatment reduces symptoms to a greater extent, than would be seen if the second treatment were administered in the absence of the first treatment, or the analogous situation is seen with the first treatment. In some embodiments, delivery is such that the reduction in a symptom, or other parameter related to the disorder is greater than what would be observed with one treatment delivered in the absence of the other. The effect of the two treatments can be partially additive, wholly additive, or greater than additive. The delivery can be such that an effect of the first treatment delivered is still detectable when the second is delivered. In one embodiment, the CAR-expressing cell is administered at a dose and/or dosing schedule described herein, and the B-cell inhibitor, or agent that enhances the activity of the CD19 CAR-expressing cell is administered at a dose and/or dosing schedule described herein.

[0431] “Derived from” as that term is used herein, indicates a relationship between a first and a second molecule. It generally refers to structural similarity between the first molecule and a second molecule and does not connote or include a process or source limitation on a first molecule that is derived from a second molecule. For example, in the case of an intracellular signaling domain that is derived from a CD3zeta molecule, the intracellular signaling domain retains sufficient CD3zeta structure such that is has the required function, namely, the ability to generate a signal under the appropriate conditions. It does not connote or include a limitation to a particular process of producing the intracellular signaling domain, e.g., it does not mean that, to provide the intracellular signaling domain, one must start with a CD3zeta sequence and delete unwanted sequence, or impose mutations, to arrive at the intracellular signaling domain.

[0432] The term “signaling domain” refers to the functional portion of a protein which acts by transmitting information within the cell to regulate cellular activity via defined signaling pathways by generating second messengers or functioning as effectors by responding to such messengers.

[0433] As used herein, the term “BCMA” refers to B-cell maturation antigen. BCMA (also known as TNFRSF17, BCM or CD269) is a member of the tumor necrosis receptor (TNFR) family and is predominantly expressed on terminally differentiated B cells, e.g., memory B cells and plasma cells. Its ligands include B-cell activating factor (BAFF) and a proliferation-inducing ligand (APRIL). The protein BCMA is encoded by the gene TNFRSF17. Exemplary BCMA sequences are available at the Uniprot database under accession number Q02223.

[0434] As used herein, the term “CD19” refers to the Cluster of Differentiation 19 protein, which is an antigenic determinant detectable on leukemia precursor cells. The human and murine amino acid and nucleic acid sequences can be found in a public database, such as GenBank, UniProt and Swiss-Prot. For example, the amino acid sequence of human CD19 can be found as UniProt/Swiss-Prot Accession No. P15391 and the nucleotide sequence encoding of the human CD19 can be found at Accession No. NM_001178098. As used herein, “CD19” includes proteins comprising mutations, e.g., point mutations, fragments, insertions, deletions and splice variants of full length wild-type CD19. CD19 is expressed on most B lineage cancers, including, e.g., acute lymphoblastic leukemia, chronic lymphocyte leukemia and non-Hodgkin lymphoma. Other cells with express CD19 are provided below in the definition of “disease associated with expression of CD19.” It is also an early marker of B cell progenitors. See, e.g., Nicholson et al. Mol. Immun. 34 (16-17): 1157-1165 (1997). In one aspect the antigen-binding portion of the CART recognizes and binds an antigen within the extracellular domain of the CD19 protein. In one aspect, the CD19 protein is expressed on a cancer cell.

[0435] The term “antibody,” as used herein, refers to a protein, or polypeptide sequence derived from an immunoglobulin molecule which specifically binds with an antigen. Antibodies can be polyclonal or monoclonal, multiple or single chain, or intact immunoglobulins, and may be derived from natural sources or from recombinant sources. Antibodies can be tetramers of immunoglobulin molecules.

[0436] The term “antibody fragment” refers to at least one portion of an antibody, that retains the ability to specifically interact with (e.g., by binding, steric hindrance, stabilizing/destabilizing, spatial distribution) an epitope of an antigen. Examples of antibody fragments include, but are not limited to, Fab, Fab′, F(ab′)₂, Fv fragments, scFv antibody fragments, disulfide-linked Fvs (sdFv), a Fd fragment consisting of the VH and CH1 domains, linear antibodies, single domain antibodies such as sdAb (either VL or VH), camelid VHH domains, multi-specific antibodies formed from antibody fragments such as a bivalent fragment comprising two Fab fragments linked by a disulfide bridge at the hinge region, and an isolated CDR or other epitope binding fragments of an antibody. An antigen binding fragment can also be incorporated into single domain antibodies, maxibodies, minibodies, nanobodies, intrabodies, diabodies, triabodies, tetrabodies, v-NAR and bis-scFv (see, e.g., Hollinger and Hudson, Nature Biotechnology 23:1126-1136, 2005). Antigen binding fragments can also be grafted into scaffolds based on polypeptides such as a fibronectin type III (Fn3)(see U.S. Pat. No. 6,703,199, which describes fibronectin polypeptide minibodies).

[0437] The term “scFv” refers to a fusion protein comprising at least one antibody fragment comprising a variable region of a light chain and at least one antibody fragment comprising a variable region of a heavy chain, wherein the light and heavy chain variable regions are contiguously linked, e.g., via a synthetic linker, e.g., a short flexible polypeptide linker, and capable of being expressed as a single chain polypeptide, and wherein the scFv retains the specificity of the intact antibody from which it is derived. Unless specified, as used herein an scFv may have the VL and VH variable regions in either order, e.g., with respect to the N-terminal and C-terminal ends of the polypeptide, the scFv may comprise VL-linker-VH or may comprise VH-linker-VL.

[0438] The term “complementarity determining region” or “CDR,” as used herein, refers to the sequences of amino acids within antibody variable regions which confer antigen specificity and binding affinity. For example, in general, there are three CDRs in each heavy chain variable region (e.g., HCDR1, HCDR2, and HCDR3) and three CDRs in each light chain variable region (LCDR1, LCDR2, and LCDR3). The precise amino acid sequence boundaries of a given CDR can be determined using any of a number of well-known schemes, including those described by Kabat et al. (1991), “Sequences of Proteins of Immunological Interest,” 5th Ed. Public Health Service, National Institutes of Health, Bethesda, Md. (“Kabat” numbering scheme), Al-Lazikani et al., (1997) JMB 273, 927-948 (“Chothia” numbering scheme), or a combination thereof. Under the Kabat numbering scheme, in some embodiments, the CDR amino acid residues in the heavy chain variable domain (VH) are numbered 31-35 (HCDR1), 50-65 (HCDR2), and 95-102 (HCDR3); and the CDR amino acid residues in the light chain variable domain (VL) are numbered 24-34 (LCDR1), 50-56 (LCDR2), and 89-97 (LCDR3). Under the Chothia numbering scheme, in some embodiments, the CDR amino acids in the VH are numbered 26-32 (HCDR1), 52-56 (HCDR2), and 95-102 (HCDR3); and the CDR amino acid residues in the VL are numbered 26-32 (LCDR1), 50-52 (LCDR2), and 91-96 (LCDR3). In a combined Kabat and Chothia numbering scheme, in some embodiments, the CDRs correspond to the amino acid residues that are part of a Kabat CDR, a Chothia CDR, or both. For instance, in some embodiments, the CDRs correspond to amino acid residues 26-35 (HCDR1), 50-65 (HCDR2), and 95-102 (HCDR3) in a VH, e.g., a mammalian VH, e.g., a human VH; and amino acid residues 24-34 (LCDR1), 50-56 (LCDR2), and 89-97 (LCDR3) in a VL, e.g., a mammalian VL, e.g., a human VL.

[0439] As used herein, the term “binding domain” or “antibody molecule” refers to a protein, e.g., an immunoglobulin chain or fragment thereof, comprising at least one immunoglobulin variable domain sequence. The term “binding domain” or “antibody molecule” encompasses antibodies and antibody fragments. In an embodiment, an antibody molecule is a multispecific antibody molecule, e.g., it comprises a plurality of immunoglobulin variable domain sequences, wherein a first immunoglobulin variable domain sequence of the plurality has binding specificity for a first epitope and a second immunoglobulin variable domain sequence of the plurality has binding specificity for a second epitope. In an embodiment, a multispecific antibody molecule is a bispecific antibody molecule. A bispecific antibody has specificity for no more than two antigens. A bispecific antibody molecule is characterized by a first immunoglobulin variable domain sequence which has binding specificity for a first epitope and a second immunoglobulin variable domain sequence that has binding specificity for a second epitope.

[0440] The portion of the CAR of the invention comprising an antibody or antibody fragment thereof may exist in a variety of forms where the antigen binding domain is expressed as part of a contiguous polypeptide chain including, for example, a single domain antibody fragment (sdAb), a single chain antibody (scFv), a humanized antibody, or bispecific antibody (Harlow et al., 1999, In: Using Antibodies: A Laboratory Manual, Cold Spring Harbor Laboratory Press, NY; Harlow et al., 1989, In: Antibodies: A Laboratory Manual, Cold Spring Harbor, N.Y.; Houston et al., 1988, Proc. Natl. Acad. Sci. USA 85:5879-5883; Bird et al., 1988, Science 242:423-426). In one aspect, the antigen binding domain of a CAR composition of the invention comprises an antibody fragment. In a further aspect, the CAR comprises an antibody fragment that comprises a scFv.

[0441] The term “antibody heavy chain,” refers to the larger of the two types of polypeptide chains present in antibody molecules in their naturally occurring conformations, and which normally determines the class to which the antibody belongs.

[0442] The term “antibody light chain,” refers to the smaller of the two types of polypeptide chains present in antibody molecules in their naturally occurring conformations. Kappa (x) and lambda (k) light chains refer to the two major antibody light chain isotypes.

[0443] The term “recombinant antibody” refers to an antibody which is generated using recombinant DNA technology, such as, for example, an antibody expressed by a bacteriophage or yeast expression system. The term should also be construed to mean an antibody which has been generated by the synthesis of a DNA molecule encoding the antibody and which DNA molecule expresses an antibody protein, or an amino acid sequence specifying the antibody, wherein the DNA or amino acid sequence has been obtained using recombinant DNA or amino acid sequence technology which is available and well known in the art.

[0444] The term “antigen” or “Ag” refers to a molecule that provokes an immune response. This immune response may involve either antibody production, or the activation of specific immunologically-competent cells, or both. The skilled artisan will understand that any macromolecule, including virtually all proteins or peptides, can serve as an antigen. Furthermore, antigens can be derived from recombinant or genomic DNA. A skilled artisan will understand that any DNA, which comprises a nucleotide sequences or a partial nucleotide sequence encoding a protein that elicits an immune response therefore encodes an “antigen” as that term is used herein. Furthermore, one skilled in the art will understand that an antigen need not be encoded solely by a full length nucleotide sequence of a gene. It is readily apparent that the present invention includes, but is not limited to, the use of partial nucleotide sequences of more than one gene and that these nucleotide sequences are arranged in various combinations to encode polypeptides that elicit the desired immune response. Moreover, a skilled artisan will understand that an antigen need not be encoded by a “gene” at all. It is readily apparent that an antigen can be generated synthesized or can be derived from a biological sample, or might be macromolecule besides a polypeptide. Such a biological sample can include, but is not limited to a tissue sample, a tumor sample, a cell or a fluid with other biological components.

[0445] The terms “compete” or “cross-compete” are used interchangeably herein to refer to the ability of an antibody molecule to interfere with binding of an antibody molecule, e.g., an anti-CD19 or BCMA antibody molecule provided herein, to a target, e.g., human CD19 or BCMA. The interference with binding can be direct or indirect (e.g., through an allosteric modulation of the antibody molecule or the target). The extent to which an antibody molecule is able to interfere with the binding of another antibody molecule to the target, and therefore whether it can be said to compete, can be determined using a competition binding assay, e.g., as described herein. In some embodiments, a competition binding assay is a quantitative competition assay. In some embodiments, a first antibody molecule is said to compete for binding to the target with a second antibody molecule when the binding of the first antibody molecule to the target is reduced by 10% or more, e.g., 20% or more, 30% or more, 40% or more, 50% or more, 55% or more, 60% or more, 65% or more, 70% or more, 75% or more, 80% or more, 85% or more, 90% or more, 95% or more, 98% or more, 99% or more in a competition binding assay (e.g., a competition assay described herein).

[0446] As used herein, the term “epitope” refers to the moieties of an antigen (e.g., human CD19 or BCMA) that specifically interact with an antibody molecule. Such moieties, referred to herein as epitopic determinants, typically comprise, or are part of, elements such as amino acid side chains or sugar side chains. An epitopic determinate can be defined, e.g., by methods known in the art or disclosed herein, e.g., by crystallography or by hydrogen-deuterium exchange. At least one or some of the moieties on the antibody molecule, that specifically interact with an epitopic determinant, are typically located in a CDR(s). Typically an epitope has a specific three dimensional structural characteristics. Typically an epitope has specific charge characteristics. Some epitopes are linear epitopes while others are conformational epitopes.

[0447] The term “anti-cancer effect” refers to a biological effect which can be manifested by various means, including but not limited to, e.g., a decrease in tumor volume, a decrease in the number of cancer cells, a decrease in the number of metastases, an increase in life expectancy, decrease in cancer cell proliferation, decrease in cancer cell survival, or amelioration of various physiological symptoms associated with the cancerous condition. An “anti-cancer effect” can also be manifested by the ability of the peptides, polynucleotides, cells and antibodies described herein in prevention of the occurrence of cancer in the first place. The term “anti-tumor effect” refers to a biological effect which can be manifested by various means, including but not limited to, e.g., a decrease in tumor volume, a decrease in the number of tumor cells, a decrease in tumor cell proliferation, or a decrease in tumor cell survival.

[0448] The term “autologous” refers to any material derived from the same individual to whom it is later to be re-introduced into the individual.

[0449] The term “allogeneic” refers to any material derived from a different animal of the same species as the individual to whom the material is introduced. Two or more individuals are said to be allogeneic to one another when the genes at one or more loci are not identical. In some aspects, allogeneic material from individuals of the same species may be sufficiently unlike genetically to interact antigenically

[0450] The term “xenogeneic” refers to a graft derived from an animal of a different species.

[0451] The term “cancer” refers to a disease characterized by the uncontrolled growth of aberrant cells. Cancer cells can spread locally or through the bloodstream and lymphatic system to other parts of the body. Examples of various cancers are described herein and include but are not limited to, breast cancer, prostate cancer, ovarian cancer, cervical cancer, skin cancer, pancreatic cancer, colorectal cancer, renal cancer, liver cancer, brain cancer, lymphoma, leukemia, lung cancer and the like. The terms “tumor” and “cancer” are used interchangeably herein, e.g., both terms encompass solid and liquid, e.g., diffuse or circulating, tumors. As used herein, the term “cancer” or “tumor” includes premalignant, as well as malignant cancers and tumors.

[0452] The terms “cancer associated antigen” or “tumor antigen” or “proliferative disorder antigen” or “antigen associated with a proliferative disorder” interchangeably refers to a molecule (typically protein, carbohydrate or lipid) that is preferentially expressed on the surface of a cancer cell, either entirely or as a fragment (e.g., MHC/peptide), in comparison to a normal cell, and which is useful for the preferential targeting of a pharmacological agent to the cancer cell. In some embodiments, a tumor antigen is a marker expressed by both normal cells and cancer cells, e.g., a lineage marker, e.g., CD19 on B cells. In certain aspects, the tumor antigens of the present invention are derived from, cancers including but not limited to primary or metastatic melanoma, thymoma, lymphoma, sarcoma, lung cancer, liver cancer, non-Hodgkin lymphoma, Hodgkin lymphoma, leukemias, uterine cancer, cervical cancer, bladder cancer, kidney cancer and adenocarcinomas such as breast cancer, prostate cancer, ovarian cancer, pancreatic cancer, and the like. In some embodiments, the tumor antigen is an antigen that is common to a specific proliferative disorder. In some embodiments, a cancer-associated antigen is a cell surface molecule that is overexpressed in a cancer cell in comparison to a normal cell, for instance, 1-fold over expression, 2-fold overexpression, 3-fold overexpression or more in comparison to a normal cell. In some embodiments, a cancer-associated antigen is a cell surface molecule that is inappropriately synthesized in the cancer cell, for instance, a molecule that contains deletions, additions or mutations in comparison to the molecule expressed on a normal cell. In some embodiments, a cancer-associated antigen will be expressed exclusively on the cell surface of a cancer cell, entirely or as a fragment (e.g., MHC/peptide), and not synthesized or expressed on the surface of a normal cell. In some embodiments, the CARs of the present invention includes CARs comprising an antigen binding domain (e.g., antibody or antibody fragment) that binds to a MHC presented peptide. Normally, peptides derived from endogenous proteins fill the pockets of Major histocompatibility complex (MHC) class I molecules, and are recognized by T cell receptors (TCRs) on CD8+T lymphocytes. The MHC class I complexes are constitutively expressed by all nucleated cells. In cancer, virus-specific and/or tumor-specific peptide/MHC complexes represent a unique class of cell surface targets for immunotherapy. TCR-like antibodies targeting peptides derived from viral or tumor antigens in the context of human leukocyte antigen (HLA)-A1 or HLA-A2 have been described (see, e.g., Sastry et al., J Virol. 201185(5):1935-1942; Sergeeva et al., Bood, 2011 117(16):4262-4272; Verma et al., J Immunol 2010 184(4):2156-2165; Willemsen et al., Gene Ther 2001 8(21):1601-1608; Dao et al., Sci Transl Med 2013 5(176):176ra33; Tassev et al., Cancer Gene Ther 2012 19(2):84-100). For example, TCR-like antibody can be identified from screening a library, such as a human scFv phage displayed library.

[0453] The phrase “disease associated with expression of CD19” includes, but is not limited to, a disease associated with expression of CD19 (e.g., wild-type or mutant CD19) or condition associated with cells which express, or at any time expressed, CD19 (e.g., wild-type or mutant CD19) including, e.g., proliferative diseases such as a cancer or malignancy or a precancerous condition such as a myelodysplasia, a myelodysplastic syndrome or a preleukemia; or a noncancer related indication associated with cells which express CD19. For the avoidance of doubt, a disease associated with expression of CD19 may include a condition associated with cells which do not presently express CD19, e.g., because CD19 expression has been downregulated, e.g., due to treatment with a molecule targeting CD19, e.g., a CD19 CAR, but which at one time expressed CD19. In one aspect, a cancer associated with expression of CD19 is a hematological cancer. In one aspect, the hematological cancer is a leukemia or a lymphoma. In one aspect, a cancer associated with expression of CD19 includes cancers and malignancies including, but not limited to, e.g., one or more acute leukemias including but not limited to, e.g., B-cell acute Lymphoid Leukemia (BALL), T-cell acute Lymphoid Leukemia (TALL), acute lymphoid leukemia (ALL); one or more chronic leukemias including but not limited to, e.g., chronic myelogenous leukemia (CML), Chronic Lymphoid Leukemia (CLL). Additional cancers or hematologic conditions associated with expression of CD19 comprise, but are not limited to, e.g., B cell prolymphocytic leukemia, blastic plasmacytoid dendritic cell neoplasm, Burkitt's lymphoma, diffuse large B cell lymphoma, Follicular lymphoma, Hairy cell leukemia, small cell- or a large cell-follicular lymphoma, malignant lymphoproliferative conditions, MALT lymphoma, mantle cell lymphoma (MCL), Marginal zone lymphoma, multiple myeloma, myelodysplasia and myelodysplastic syndrome, non-Hodgkin lymphoma, Hodgkin lymphoma, plasmablastic lymphoma, plasmacytoid dendritic cell neoplasm, Waldenstrom macroglobulinemia, and “preleukemia” which are a diverse collection of hematological conditions united by ineffective production (or dysplasia) of myeloid blood cells, and the like. Further diseases associated with expression of CD19 expression include, but not limited to, e.g., atypical and/or non-classical cancers, malignancies, precancerous conditions or proliferative diseases associated with expression of CD19. Non-cancer related indications associated with expression of CD19 include, but are not limited to, e.g., autoimmune disease, (e.g., lupus), inflammatory disorders (allergy and asthma) and transplantation. In some embodiments, the CD19-expressing cells express, or at any time expressed, CD19 mRNA. In an embodiment, the CD19-expressing cells produce a CD19 protein (e.g., wild-type or mutant), and the CD19 protein may be present at normal levels or reduced levels. In an embodiment, the CD19-expressing cells produced detectable levels of a CD19 protein at one point, and subsequently produced substantially no detectable CD19 protein.

[0454] The phrase “disease associated with expression of BCMA” includes, but is not limited to, a disease associated with a cell which expresses BCMA (e.g., wild-type or mutant BCMA) or condition associated with a cell which expresses BCMA (e.g., wild-type or mutant BCMA) including, e.g., proliferative diseases such as a cancer or malignancy or a precancerous condition such as a myelodysplasia, a myelodysplastic syndrome or a preleukemia; or a noncancer related indication associated with a cell which expresses BCMA (e.g., wild-type or mutant BCMA). For the avoidance of doubt, a disease associated with expression of BCMA may include a condition associated with a cell which does not presently express BCMA, e.g., because BCMA expression has been downregulated, e.g., due to treatment with a molecule targeting BCMA, e.g., a BCMA inhibitor described herein, but which at one time expressed BCMA. In one aspect, a cancer associated with expression of BCMA (e.g., wild-type or mutant BCMA) is a hematological cancer. In one aspect, the hematological cancer is a leukemia or a lymphoma. In one aspect, a cancer associated with expression of BCMA (e.g., wild-type or mutant BCMA) is a malignancy of differentiated plasma B cells. In one aspect, a cancer associated with expression of BCMA (e.g., wild-type or mutant BCMA) includes cancers and malignancies including, but not limited to, e.g., one or more acute leukemias including but not limited to, e.g., B-cell acute Lymphoid Leukemia (“BALL”), T-cell acute Lymphoid Leukemia (“TALL”), acute lymphoid leukemia (ALL); one or more chronic leukemias including but not limited to, e.g., chronic myelogenous leukemia (CML), Chronic Lymphoid Leukemia (CLL). Additional cancers or hematologic conditions associated with expression of BMCA (e.g., wild-type or mutant BCMA) comprise, but are not limited to, e.g., B cell prolymphocytic leukemia, blastic plasmacytoid dendritic cell neoplasm, Burkitt's lymphoma, diffuse large B cell lymphoma, Follicular lymphoma, Hairy cell leukemia, small cell- or a large cell-follicular lymphoma, malignant lymphoproliferative conditions, MALT lymphoma, mantle cell lymphoma, Marginal zone lymphoma, multiple myeloma, myelodysplasia and myelodysplastic syndrome, non-Hodgkin's lymphoma, plasmablastic lymphoma, plasmacytoid dendritic cell neoplasm, Waldenstrom macroglobulinemia, and “preleukemia” which are a diverse collection of hematological conditions united by ineffective production (or dysplasia) of myeloid blood cells, and the like. In some embodiments, the cancer is multiple myeloma, Hodgkin's lymphoma, non-Hodgkin's lymphoma, or glioblastoma. In embodiments, a disease associated with expression of BCMA includes a plasma cell proliferative disorder, e.g., asymptomatic myeloma (smoldering multiple myeloma or indolent myeloma), monoclonal gammapathy of undetermined significance (MGUS), Waldenstrom's macroglobulinemia, plasmacytomas (e.g., plasma cell dyscrasia, solitary myeloma, solitary plasmacytoma, extramedullary plasmacytoma, and multiple plasmacytoma), systemic amyloid light chain amyloidosis, and POEMS syndrome (also known as Crow-Fukase syndrome, Takatsuki disease, and PEP syndrome). Further diseases associated with expression of BCMA (e.g., wild-type or mutant BCMA) expression include, but not limited to, e.g., atypical and/or non-classical cancers, malignancies, precancerous conditions or proliferative diseases associated with expression of BCMA (e.g., wild-type or mutant BCMA), e.g., a cancer described herein, e.g., a prostate cancer (e.g., castrate-resistant or therapy-resistant prostate cancer, or metastatic prostate cancer), pancreatic cancer, or lung cancer.

[0455] Non-cancer related conditions that are associated with BCMA (e.g., wild-type or mutant BCMA) include viral infections; e.g., HIV, fungal infections, e.g., C. neoformans; autoimmune disease; e.g. rheumatoid arthritis, system lupus erythematosus (SLE or lupus), pemphigus vulgaris, and Sjogren's syndrome; inflammatory bowel disease, ulcerative colitis; transplant-related allospecific immunity disorders related to mucosal immunity; and unwanted immune responses towards biologics (e.g., Factor VIII) where humoral immunity is important. In embodiments, a non-cancer related indication associated with expression of BCMA includes but is not limited to, e.g., autoimmune disease, (e.g., lupus), inflammatory disorders (allergy and asthma) and transplantation. In some embodiments, the tumor antigen-expressing cell expresses, or at any time expressed, mRNA encoding the tumor antigen. In an embodiment, the tumor antigen-expressing cell produces the tumor antigen protein (e.g., wild-type or mutant), and the tumor antigen protein may be present at normal levels or reduced levels. In an embodiment, the tumor antigen-expressing cell produced detectable levels of a tumor antigen protein at one point, and subsequently produced substantially no detectable tumor antigen protein.

[0456] The term “conservative sequence modifications” refers to amino acid modifications that do not significantly affect or alter the binding characteristics of the antibody or antibody fragment containing the amino acid sequence. Such conservative modifications include amino acid substitutions, additions and deletions. Modifications can be introduced into an antibody or antibody fragment of the invention by standard techniques known in the art, such as site-directed mutagenesis and PCR-mediated mutagenesis. Conservative amino acid substitutions are ones in which the amino acid residue is replaced with an amino acid residue having a similar side chain. Families of amino acid residues having similar side chains have been defined in the art. These families include amino acids with basic side chains (e.g., lysine, arginine, histidine), acidic side chains (e.g., aspartic acid, glutamic acid), uncharged polar side chains (e.g., glycine, asparagine, glutamine, serine, threonine, tyrosine, cysteine, tryptophan), nonpolar side chains (e.g., alanine, valine, leucine, isoleucine, proline, phenylalanine, methionine), beta-branched side chains (e.g., threonine, valine, isoleucine) and aromatic side chains (e.g., tyrosine, phenylalanine, tryptophan, histidine). Thus, one or more amino acid residues within a CAR of the invention can be replaced with other amino acid residues from the same side chain family and the altered CAR can be tested using the functional assays described herein.

[0457] The term “stimulation,” refers to a primary response induced by binding of a stimulatory molecule (e.g., a TCR/CD3 complex or CAR) with its cognate ligand (or tumor antigen in the case of a CAR) thereby mediating a signal transduction event, such as, but not limited to, signal transduction via the TCR/CD3 complex or signal transduction via the appropriate NK receptor or signaling domains of the CAR. Stimulation can mediate altered expression of certain molecules.

[0458] The term “stimulatory molecule,” refers to a molecule expressed by an immune cell, e.g., T cell, NK cell, or B cell) that provides the cytoplasmic signaling sequence(s) that regulate activation of the immune cell in a stimulatory way for at least some aspect of the immune cell signaling pathway. In one aspect, the signal is a primary signal that is initiated by, for instance, binding of a TCR/CD3 complex with an MHC molecule loaded with peptide, and which leads to mediation of a T cell response, including, but not limited to, proliferation, activation, differentiation, and the like. A primary cytoplasmic signaling sequence (also referred to as a “primary signaling domain”) that acts in a stimulatory manner may contain a signaling motif which is known as immunoreceptor tyrosine-based activation motif or ITAM. Examples of an ITAM containing cytoplasmic signaling sequence that is of particular use in the invention includes, but is not limited to, those derived from CD3 zeta, common FcR gamma (FCER1G), Fc gamma RIIa, FcR beta (Fc Epsilon Rib), CD3 gamma, CD3 delta, CD3 epsilon, CD79a, CD79b, DAP10, and DAP12. In a specific CAR of the invention, the intracellular signaling domain in any one or more CARS of the invention comprises an intracellular signaling sequence, e.g., a primary signaling sequence of CD3-zeta. In a specific CAR of the invention, the primary signaling sequence of CD3-zeta is the sequence provided as SEQ ID NO:17, or the equivalent residues from a non-human species, e.g., mouse, rodent, monkey, ape and the like. In a specific CAR of the invention, the primary signaling sequence of CD3-zeta is the sequence as provided in SEQ ID NO:43, or the equivalent residues from a non-human species, e.g., mouse, rodent, monkey, ape and the like.

[0459] The term “antigen presenting cell” or “APC” refers to an immune system cell such as an accessory cell (e.g., a B-cell, a dendritic cell, and the like) that displays a foreign antigen complexed with major histocompatibility complexes (MHC's) on its surface. T-cells may recognize these complexes using their T-cell receptors (TCRs). APCs process antigens and present them to T-cells.

[0460] “Immune effector cell,” as that term is used herein, refers to a cell that is involved in an immune response, e.g., in the promotion of an immune effector response. Examples of immune effector cells include T cells, e.g., alpha/beta T cells and gamma/delta T cells, B cells, natural killer (NK) cells, natural killer T (NK-T) cells, mast cells, and myeloid-derived phagocytes.

[0461] “Immune effector function or immune effector response,” as that term is used herein, refers to function or response, e.g., of an immune effector cell, that enhances or promotes an immune attack of a target cell. E.g., an immune effector function or response refers a property of a T or NK cell that promotes killing or the inhibition of growth or proliferation, of a target cell. In the case of a T cell, primary stimulation and co-stimulation are examples of immune effector function or response.

[0462] The term “effector function” refers to a specialized function of a cell. Effector function of a T cell, for example, may be cytolytic activity or helper activity including the secretion of cytokines.

[0463] An “intracellular signaling domain,” as the term is used herein, refers to an intracellular portion of a molecule. The intracellular signaling domain can generate a signal that promotes an immune effector function of the CAR containing cell, e.g., a CART cell. Examples of immune effector function, e.g., in a CART cell, include cytolytic activity and helper activity, including the secretion of cytokines. In embodiments, the intracellular signal domain is the portion of the protein which transduces the effector function signal and directs the cell to perform a specialized function. While the entire intracellular signaling domain can be employed, in many cases it is not necessary to use the entire chain. To the extent that a truncated portion of the intracellular signaling domain is used, such truncated portion may be used in place of the intact chain as long as it transduces the effector function signal. The term intracellular signaling domain is thus meant to include any truncated portion of the intracellular signaling domain sufficient to transduce the effector function signal.

[0464] In an embodiment, the intracellular signaling domain can comprise a primary intracellular signaling domain. Exemplary primary intracellular signaling domains include those derived from the molecules responsible for primary stimulation, or antigen dependent simulation. In an embodiment, the intracellular signaling domain can comprise a costimulatory intracellular domain. Exemplary costimulatory intracellular signaling domains include those derived from molecules responsible for costimulatory signals, or antigen independent stimulation. For example, in the case of a CART, a primary intracellular signaling domain can comprise a cytoplasmic sequence of a T cell receptor, and a costimulatory intracellular signaling domain can comprise cytoplasmic sequence from co-receptor or costimulatory molecule.

[0465] A primary intracellular signaling domain can comprise a signaling motif which is known as an immunoreceptor tyrosine-based activation motif or ITAM. Examples of ITAM containing primary cytoplasmic signaling sequences include, but are not limited to, those derived from CD3 zeta, FcR gamma, common FcR gamma (FCER1G), Fc gamma RIIa, FcR beta (Fc Epsilon Rib), CD3 gamma, CD3 delta, CD3 epsilon, CD22, CD79a, CD79b, CD278 (“ICOS”), FRI, CD66d, CD32, DAP10 and DAP12.

[0466] The term “zeta” or alternatively “zeta chain”, “CD3-zeta” or “TCR-zeta” is defined as the protein provided as GenBank Acc. No. BAG36664.1, or the equivalent residues from a non-human species, e.g., mouse, rodent, monkey, ape and the like, and a “zeta stimulatory domain” or alternatively a “CD3-zeta stimulatory domain” or a “TCR-zeta stimulatory domain” is defined as the amino acid residues from the cytoplasmic domain of the zeta chain, or functional derivatives thereof, that are sufficient to functionally transmit an initial signal necessary for T cell activation. In one aspect the cytoplasmic domain of zeta comprises residues 52 through 164 of GenBank Acc. No. BAG36664.1 or the equivalent residues from a non-human species, e.g., mouse, rodent, monkey, ape and the like, that are functional orthologs thereof. In one aspect, the “zeta stimulatory domain” or a “CD3-zeta stimulatory domain” is the sequence provided as SEQ ID NO:17. In one aspect, the “zeta stimulatory domain” or a “CD3-zeta stimulatory domain” is the sequence provided as SEQ ID NO:43.

[0467] The term “costimulatory molecule” refers to the cognate binding partner on a T cell that specifically binds with a costimulatory ligand, thereby mediating a costimulatory response by the T cell, such as, but not limited to, proliferation. Costimulatory molecules are cell surface molecules other than antigen receptors or their ligands that contribute to an efficient immune response. Costimulatory molecules include, but are not limited to an MHC class I molecule, TNF receptor proteins, Immunoglobulin-like proteins, cytokine receptors, integrins, signalling lymphocytic activation molecules (SLAM proteins), activating NK cell receptors, BTLA, a Toll ligand receptor, OX40, CD2, CD7, CD27, CD28, CD30, CD40, CDS, ICAM-1, LFA-1 (CD11a/CD18), 4-1BB (CD137), B7-H3, CDS, ICAM-1, ICOS (CD278), GITR, BAFFR, LIGHT, HVEM (LIGHTR), KIRDS2, SLAMF7, NKp80 (KLRF1), NKp44, NKp30, NKp46, CD19, CD4, CD8alpha, CD8beta, IL2R beta, IL2R gamma, IL7R alpha, ITGA4, VLA1, CD49a, ITGA4, IA4, CD49D, ITGA6, VLA-6, CD49f, ITGAD, CD11d, ITGAE, CD103, ITGAL, CD11a, LFA-1, ITGAM, CD11b, ITGAX, CD11c, ITGB1, CD29, ITGB2, CD18, LFA-1, ITGB7, NKG2D, NKG2C, TNFR2, TRANCE/RANKL, DNAM1 (CD226), SLAMF4 (CD244, 2B4), CD84, CD96 (Tactile), CEACAM1, CRTAM, Ly9 (CD229), CD160 (BY55), PSGL1, CD100 (SEMA4D), CD69, SLAMF6 (NTB-A, Ly108), SLAM (SLAMF1, CD150, IPO-3), BLAME (SLAMF8), SELPLG (CD162), LTBR, LAT, GADS, SLP-76, PAG/Cbp, CD19a, and a ligand that specifically binds with CD83.

[0468] A costimulatory intracellular signaling domain refers to the intracellular portion of a costimulatory molecule. The intracellular signaling domain can comprise the entire intracellular portion, or the entire native intracellular signaling domain, of the molecule from which it is derived, or a functional fragment or derivative thereof.

[0469] The term “4-1BB” refers to a member of the TNFR superfamily with an amino acid sequence provided as GenBank Acc. No. AAA62478.2, or the equivalent residues from a non-human species, e.g., mouse, rodent, monkey, ape and the like; and a “4-1BB costimulatory domain” is defined as amino acid residues 214-255 of GenBank Acc. No. AAA62478.2, or the equivalent residues from a non-human species, e.g., mouse, rodent, monkey, ape and the like. In one aspect, the “4-1BB costimulatory domain” is the sequence provided as SEQ ID NO:16 or the equivalent residues from a non-human species, e.g., mouse, rodent, monkey, ape and the like.

[0470] The term “encoding” refers to the inherent property of specific sequences of nucleotides in a polynucleotide, such as a gene, a cDNA, or an mRNA, to serve as templates for synthesis of other polymers and macromolecules in biological processes having either a defined sequence of nucleotides (e.g., rRNA, tRNA and mRNA) or a defined sequence of amino acids and the biological properties resulting therefrom. Thus, a gene, cDNA, or RNA, encodes a protein if transcription and translation of mRNA corresponding to that gene produces the protein in a cell or other biological system. Both the coding strand, the nucleotide sequence of which is identical to the mRNA sequence and is usually provided in sequence listings, and the non-coding strand, used as the template for transcription of a gene or cDNA, can be referred to as encoding the protein or other product of that gene or cDNA.

[0471] Unless otherwise specified, a “nucleotide sequence encoding an amino acid sequence” includes all nucleotide sequences that are degenerate versions of each other and that encode the same amino acid sequence. The phrase nucleotide sequence that encodes a protein or a RNA may also include introns to the extent that the nucleotide sequence encoding the protein may in some version contain an intron(s).

[0472] The term “effective amount” or “therapeutically effective amount” are used interchangeably herein, and refer to an amount of a compound, formulation, material, or composition, as described herein effective to achieve a particular biological result.

[0473] The term “endogenous” refers to any material from or produced inside an organism, cell, tissue or system.

[0474] The term “exogenous” refers to any material introduced from or produced outside an organism, cell, tissue or system.

[0475] The term “expression” refers to the transcription and/or translation of a particular nucleotide sequence driven by a promoter.

[0476] The term “transfer vector” refers to a composition of matter which comprises an isolated nucleic acid and which can be used to deliver the isolated nucleic acid to the interior of a cell. Numerous vectors are known in the art including, but not limited to, linear polynucleotides, polynucleotides associated with ionic or amphiphilic compounds, plasmids, and viruses. Thus, the term “transfer vector” includes an autonomously replicating plasmid or a virus. The term should also be construed to further include non-plasmid and non-viral compounds which facilitate transfer of nucleic acid into cells, such as, for example, a polylysine compound, liposome, and the like. Examples of viral transfer vectors include, but are not limited to, adenoviral vectors, adeno-associated virus vectors, retroviral vectors, lentiviral vectors, and the like.

[0477] The term “expression vector” refers to a vector comprising a recombinant polynucleotide comprising expression control sequences operatively linked to a nucleotide sequence to be expressed. An expression vector comprises sufficient cis-acting elements for expression; other elements for expression can be supplied by the host cell or in an in vitro expression system. Expression vectors include all those known in the art, including cosmids, plasmids (e.g., naked or contained in liposomes) and viruses (e.g., lentiviruses, retroviruses, adenoviruses, and adeno-associated viruses) that incorporate the recombinant polynucleotide.

[0478] The term “lentivirus” refers to a genus of the Retroviridae family. Lentiviruses are unique among the retroviruses in being able to infect non-dividing cells; they can deliver a significant amount of genetic information into the DNA of the host cell, so they are one of the most efficient methods of a gene delivery vector. HIV, SIV, and FIV are all examples of lentiviruses. The term “lentiviral vector” refers to a vector derived from at least a portion of a lentivirus genome, including especially a self-inactivating lentiviral vector as provided in Milone et al., Mol. Ther. 17(8): 1453-1464 (2009). Other examples of lentivirus vectors that may be used in the clinic, include but are not limited to, e.g., the LENTIVECTOR® gene delivery technology from Oxford BioMedica, the LENTIMAX™ vector system from Lentigen and the like. Nonclinical types of lentiviral vectors are also available and would be known to one skilled in the art.

[0479] The term “homologous” or “identity” refers to the subunit sequence identity between two polymeric molecules, e.g., between two nucleic acid molecules, such as, two DNA molecules or two RNA molecules, or between two polypeptide molecules. When a subunit position in both of the two molecules is occupied by the same monomeric subunit; e.g., if a position in each of two DNA molecules is occupied by adenine, then they are homologous or identical at that position. The homology between two sequences is a direct function of the number of matching or homologous positions; e.g., if half (e.g., five positions in a polymer ten subunits in length) of the positions in two sequences are homologous, the two sequences are 50% homologous; if 90% of the positions (e.g., 9 of 10), are matched or homologous, the two sequences are 90% homologous.

[0480] “Humanized” forms of non-human (e.g., murine) antibodies are chimeric immunoglobulins, immunoglobulin chains or fragments thereof (such as Fv, Fab, Fab′, F(ab′)2 or other antigen-binding subsequences of antibodies) which contain minimal sequence derived from non-human immunoglobulin. For the most part, humanized antibodies and antibody fragments thereof are human immunoglobulins (recipient antibody or antibody fragment) in which residues from a complementary-determining region (CDR) of the recipient are replaced by residues from a CDR of a non-human species (donor antibody) such as mouse, rat or rabbit having the desired specificity, affinity, and capacity. In some instances, Fv framework region (FR) residues of the human immunoglobulin are replaced by corresponding non-human residues. Furthermore, a humanized antibody/antibody fragment can comprise residues which are found neither in the recipient antibody nor in the imported CDR or framework sequences. These modifications can further refine and optimize antibody or antibody fragment performance. In general, the humanized antibody or antibody fragment thereof will comprise substantially all of at least one, and typically two, variable domains, in which all or substantially all of the CDR regions correspond to those of a non-human immunoglobulin and all or a significant portion of the FR regions are those of a human immunoglobulin sequence. The humanized antibody or antibody fragment can also comprise at least a portion of an immunoglobulin constant region (Fc), typically that of a human immunoglobulin. For further details, see Jones et al., Nature, 321: 522-525, 1986; Reichmann et al., Nature, 332: 323-329, 1988; Presta, Curr. Op. Struct. Biol., 2: 593-596, 1992.

[0481] “Fully human” refers to an immunoglobulin, such as an antibody or antibody fragment, where the whole molecule is of human origin or consists of an amino acid sequence identical to a human form of the antibody or immunoglobulin.

[0482] The term “isolated” means altered or removed from the natural state. For example, a nucleic acid or a peptide naturally present in a living animal is not “isolated,” but the same nucleic acid or peptide partially or completely separated from the coexisting materials of its natural state is “isolated.” An isolated nucleic acid or protein can exist in substantially purified form, or can exist in a non-native environment such as, for example, a host cell.

[0483] In the context of the present invention, the following abbreviations for the commonly occurring nucleic acid bases are used. “A” refers to adenosine, “C” refers to cytosine, “G” refers to guanosine, “T” refers to thymidine, and “U” refers to uridine.

[0484] The term “operably linked” or “transcriptional control” refers to functional linkage between a regulatory sequence and a heterologous nucleic acid sequence resulting in expression of the latter. For example, a first nucleic acid sequence is operably linked with a second nucleic acid sequence when the first nucleic acid sequence is placed in a functional relationship with the second nucleic acid sequence. For instance, a promoter is operably linked to a coding sequence if the promoter affects the transcription or expression of the coding sequence. Operably linked DNA sequences can be contiguous with each other and, e.g., where necessary to join two protein coding regions, are in the same reading frame.

[0485] The term “parenteral” administration of an immunogenic composition includes, e.g., subcutaneous (s.c.), intravenous (i.v.), intramuscular (i.m.), or intrasternal injection, intratumoral, or infusion techniques.

[0486] The term “nucleic acid” or “polynucleotide” refers to deoxyribonucleic acids (DNA) or ribonucleic acids (RNA) and polymers thereof in either single- or double-stranded form. The term “nucleic acid” includes a gene, cDNA, or an mRNA. In one embodiment, the nucleic acid molecule is synthetic (e.g., chemically synthesized) or recombinant. Unless specifically limited, the term encompasses nucleic acids containing analogues or derivatives of natural nucleotides that have similar binding properties as the reference nucleic acid and are metabolized in a manner similar to naturally occurring nucleotides. Unless otherwise indicated, a particular nucleic acid sequence also implicitly encompasses conservatively modified variants thereof (e.g., degenerate codon substitutions), alleles, orthologs, SNPs, and complementary sequences as well as the sequence explicitly indicated. Specifically, degenerate codon substitutions may be achieved by generating sequences in which the third position of one or more selected (or all) codons is substituted with mixed-base and/or deoxyinosine residues (Batzer et al., Nucleic Acid Res. 19:5081 (1991); Ohtsuka et al., J. Biol. Chem. 260:2605-2608 (1985); and Rossolini et al., Mol. Cell. Probes 8:91-98 (1994)).

[0487] The terms “peptide,” “polypeptide,” and “protein” are used interchangeably, and refer to a compound comprised of amino acid residues covalently linked by peptide bonds. A protein or peptide must contain at least two amino acids, and no limitation is placed on the maximum number of amino acids that can comprise a protein's or peptide's sequence. Polypeptides include any peptide or protein comprising two or more amino acids joined to each other by peptide bonds. As used herein, the term refers to both short chains, which also commonly are referred to in the art as peptides, oligopeptides and oligomers, for example, and to longer chains, which generally are referred to in the art as proteins, of which there are many types. “Polypeptides” include, for example, biologically active fragments, substantially homologous polypeptides, oligopeptides, homodimers, heterodimers, variants of polypeptides, modified polypeptides, derivatives, analogs, fusion proteins, among others. A polypeptide includes a natural peptide, a recombinant peptide, or a combination thereof.

[0488] As used herein, the term “plurality” refers to two or more.

[0489] The term “promoter” refers to a DNA sequence recognized by the synthetic machinery of the cell, or introduced synthetic machinery, required to initiate the specific transcription of a polynucleotide sequence.

[0490] The term “promoter/regulatory sequence” refers to a nucleic acid sequence which is required for expression of a gene product operably linked to the promoter/regulatory sequence. In some instances, this sequence may be the core promoter sequence and in other instances, this sequence may also include an enhancer sequence and other regulatory elements which are required for expression of the gene product. The promoter/regulatory sequence may, for example, be one which expresses the gene product in a tissue specific manner.

[0491] The term “constitutive” promoter refers to a nucleotide sequence which, when operably linked with a polynucleotide which encodes or specifies a gene product, causes the gene product to be produced in a cell under most or all physiological conditions of the cell.

[0492] The term “inducible” promoter refers to a nucleotide sequence which, when operably linked with a polynucleotide which encodes or specifies a gene product, causes the gene product to be produced in a cell substantially only when an inducer which corresponds to the promoter is present in the cell.

[0493] The term “tissue-specific” promoter refers to a nucleotide sequence which, when operably linked with a polynucleotide encodes or specified by a gene, causes the gene product to be produced in a cell substantially only if the cell is a cell of the tissue type corresponding to the promoter.

[0494] The term “flexible polypeptide linker” or “linker” as used in the context of a scFv refers to a peptide linker that consists of amino acids such as glycine and/or serine residues used alone or in combination, to link variable heavy and variable light chain regions together. In one embodiment, the flexible polypeptide linker is a Gly/Ser linker and comprises the amino acid sequence (Gly-Gly-Gly-Ser)n, where n is a positive integer equal to or greater than 1. For example, n=1, n=2, n=3. n=4, n=5, n=6, n=7, n=8, n=9 and n=10 (SEQ ID NO:105). In one embodiment, the flexible polypeptide linkers include, but are not limited to, (Gly₄ Ser)₄ (SEQ ID NO:106) or (Gly₄ Ser)₃ (SEQ ID NO:107). In another embodiment, the linkers include multiple repeats of (Gly₂Ser), (GlySer) or (Gly₃Ser) (SEQ ID NO:108). Also included within the scope of the invention are linkers described in WO2012/138475, incorporated herein by reference.

[0495] As used herein, a 5′ cap (also termed an RNA cap, an RNA 7-methylguanosine cap or an RNA m⁷G cap) is a modified guanine nucleotide that has been added to the “front” or 5′ end of a eukaryotic messenger RNA shortly after the start of transcription. The 5′ cap consists of a terminal group which is linked to the first transcribed nucleotide. Its presence is important for recognition by the ribosome and protection from RNases. Cap addition is coupled to transcription, and occurs co-transcriptionally, such that each influences the other. Shortly after the start of transcription, the 5′ end of the mRNA being synthesized is bound by a cap-synthesizing complex associated with RNA polymerase. This enzymatic complex catalyzes the chemical reactions that are required for mRNA capping. Synthesis proceeds as a multi-step biochemical reaction. The capping moiety can be modified to modulate functionality of mRNA such as its stability or efficiency of translation.

[0496] As used herein, “in vitro transcribed RNA” refers to RNA, e.g., mRNA, that has been synthesized in vitro. Generally, the in vitro transcribed RNA is generated from an in vitro transcription vector. The in vitro transcription vector comprises a template that is used to generate the in vitro transcribed RNA.

[0497] As used herein, a “poly(A)” is a series of adenosines attached by polyadenylation to the mRNA. In some embodiments of a construct for transient expression, the polyA is between 50 and 5000 (SEQ ID NO: 28), e.g., greater than 64, e.g., greater than 100, e.g., than 300 or 400. Poly(A) sequences can be modified chemically or enzymatically to modulate mRNA functionality such as localization, stability or efficiency of translation.

[0498] As used herein, “polyadenylation” refers to the covalent linkage of a polyadenylyl moiety, or its modified variant, to a messenger RNA molecule. In eukaryotic organisms, most messenger RNA (mRNA) molecules are polyadenylated at the 3′ end. The 3′ poly(A) tail is a long sequence of adenine nucleotides (often several hundred) added to the pre-mRNA through the action of an enzyme, polyadenylate polymerase. In higher eukaryotes, the poly(A) tail is added onto transcripts that contain a specific sequence, the polyadenylation signal. The poly(A) tail and the protein bound to it aid in protecting mRNA from degradation by exonucleases. Polyadenylation is also important for transcription termination, export of the mRNA from the nucleus, and translation. Polyadenylation occurs in the nucleus immediately after transcription of DNA into RNA, but additionally can also occur later in the cytoplasm. After transcription has been terminated, the mRNA chain is cleaved through the action of an endonuclease complex associated with RNA polymerase. The cleavage site is usually characterized by the presence of the base sequence AAUAAA near the cleavage site. After the mRNA has been cleaved, adenosine residues are added to the free 3′ end at the cleavage site.

[0499] As used herein, “transient” refers to expression of a non-integrated transgene for a period of hours, days or weeks, wherein the period of time of expression is less than the period of time for expression of the gene if integrated into the genome or contained within a stable plasmid replicon in the host cell.

[0500] The term “signal transduction pathway” refers to the biochemical relationship between a variety of signal transduction molecules that play a role in the transmission of a signal from one portion of a cell to another portion of a cell. The phrase “cell surface receptor” includes molecules and complexes of molecules capable of receiving a signal and transmitting signal across the membrane of a cell.

[0501] The term “subject” is intended to include living organisms in which an immune response can be elicited (e.g., mammals, human).

[0502] The term, a “substantially purified” cell refers to a cell that is essentially free of other cell types. A substantially purified cell also refers to a cell which has been separated from other cell types with which it is normally associated in its naturally occurring state. In some instances, a population of substantially purified cells refers to a homogenous population of cells. In other instances, this term refers simply to cell that have been separated from the cells with which they are naturally associated in their natural state. In some aspects, the cells are cultured in vitro. In other aspects, the cells are not cultured in vitro.

[0503] The term “therapeutic” as used herein means a treatment. A therapeutic effect is obtained by reduction, suppression, remission, or eradication of a disease state.

[0504] The term “prophylaxis” as used herein means the prevention of or protective treatment for a disease or disease state.

[0505] In the context of the present invention, “tumor antigen” or “hyperproliferative disorder antigen” or “antigen associated with a hyperproliferative disorder” refers to antigens that are common to specific hyperproliferative disorders. In certain aspects, the hyperproliferative disorder antigens of the present invention are derived from, cancers including but not limited to primary or metastatic melanoma, thymoma, lymphoma, sarcoma, lung cancer, liver cancer, non-Hodgkin lymphoma, Hodgkin lymphoma, leukemias, uterine cancer, cervical cancer, bladder cancer, kidney cancer and adenocarcinomas such as breast cancer, prostate cancer, ovarian cancer, pancreatic cancer, and the like.

[0506] The term “transfected” or “transformed” or “transduced” refers to a process by which exogenous nucleic acid is transferred or introduced into the host cell. A “transfected” or “transformed” or “transduced” cell is one which has been transfected, transformed or transduced with exogenous nucleic acid. The cell includes the primary subject cell and its progeny.

[0507] A subject “responds” to treatment if a parameter of a cancer (e.g., a hematological cancer, e.g., cancer cell growth, proliferation and/or survival) in the subject is retarded or reduced by a detectable amount, e.g., about 5%, 10%, 20%, 30%, 40%, 50%, 60%, 70%, 80%, 90% or more as determined by any appropriate measure, e.g., by mass, cell count or volume. In one example, a subject responds to treatment if the subject experiences a life expectancy extended by about 5%, 10%, 20%, 30%, 40%, 50% or more beyond the life expectancy predicted if no treatment is administered. In another example, a subject responds to treatment, if the subject has an increased disease-free survival, overall survival or increased time to progression. Several methods can be used to determine if a patient responds to a treatment including, for example, criteria provided by NCCN Clinical Practice Guidelines in Oncology (NCCN Guidelines®). For example, in the context of B-ALL, a complete response or complete responder, may involve one or more of: <5% BM blast, >1000 neutrophil/ANC (/μL). >100,000 platelets (/μL) with no circulating blasts or extramedullary disease (no lymphadenopathy, splenomegaly, skin/gum infiltration/testicular mass/CNS involvement), Trilineage hematopoiesis, and no recurrence for 4 weeks. A partial responder may involve one or more of >50% reduction in BM blast, >1000 neutrophil/ANC (/μL). >100,000 platelets (/μL). A non-responder can show disease progression, e.g., >25% in BM blasts.

[0508] “Refractory” as used herein refers to a disease, e.g., cancer, that does not respond to a treatment. In embodiments, a refractory cancer can be resistant to a treatment before or at the beginning of the treatment. In other embodiments, the refractory cancer can become resistant during a treatment. A refractory cancer is also called a resistant cancer.

[0509] The term “relapse” as used herein refers to reappearance of a cancer after an initial period of responsiveness (e.g., complete response or partial response). The initial period of responsiveness may involve the level of cancer cells falling below a certain threshold, e.g., below 20%, 1%, 10%, 5%, 4%, 3%, 2%, or 1%. The reappearance may involve the level of cancer cells rising above a certain threshold, e.g., above 20%, 1%, 10%, 5%, 4%, 3%, 2%, or 1%. For example, e.g., in the context of B-ALL, the reappearance may involve, e.g., a reappearance of blasts in the blood, bone marrow (>5%), or any extramedullary site, after a complete response. A complete response, in this context, may involve <5% BM blast. More generally, in an embodiment, a response (e.g., complete response or partial response) can involve the absence of detectable MRD (minimal residual disease). In an embodiment, the initial period of responsiveness lasts at least 1, 2, 3, 4, 5, or 6 days; at least 1, 2, 3, or 4 weeks; at least 1, 2, 3, 4, 6, 8, 10, or 12 months; or at least 1, 2, 3, 4, or 5 years.

[0510] In some embodiments, a therapy that includes a CD19 inhibitor, e.g., a CD19 CAR therapy, may relapse or be refractory to treatment. The relapse or resistance can be caused by CD19 loss (e.g., an antigen loss mutation) or other CD19 alteration that reduces the level of CD19 (e.g., caused by clonal selection of CD19-negative clones). A cancer that harbors such CD19 loss or alteration is referred to herein as a “CD19-negative cancer” or a “CD19-negative relapsed cancer”). It shall be understood that a CD19-negative cancer need not have 100% loss of CD19, but a sufficient reduction to reduce the effectiveness of a CD19 therapy such that the cancer relapses or becomes refractory. In some embodiments, a CD19-negative cancer results from a CD19 CAR therapy.

[0511] The term “specifically binds,” refers to an antibody, or a ligand, which recognizes and binds with a binding partner (e.g., a stimulatory tumor antigen) protein present in a sample, but which antibody or ligand does not substantially recognize or bind other molecules in the sample.

[0512] As used herein, the term “pharmaceutically acceptable salt” refers to those salts which are, within the scope of sound medical judgment, suitable for use in contact with the tissues of subjects without undue toxicity, irritation, allergic response and the like, and are commensurate with a reasonable benefit/risk ratio. Pharmaceutically acceptable salts are well known in the art. For example, Berge et al. describes pharmaceutically acceptable salts in detail in J. Pharmaceutical Sciences (1977) 66:1-19.

[0513] “Regulatable chimeric antigen receptor (RCAR),” as that term is used herein, refers to a set of polypeptides, typically two in the simplest embodiments, which when in a RCARX cell, provides the RCARX cell with specificity for a target cell, typically a cancer cell, and with regulatable intracellular signal generation or proliferation, which can optimize an immune effector property of the RCARX cell. An RCARX cell relies at least in part, on an antigen binding domain to provide specificity to a target cell that comprises the antigen bound by the antigen binding domain. In an embodiment, an RCAR includes a dimerization switch that, upon the presence of a dimerization molecule, can couple an intracellular signaling domain to the antigen binding domain.

[0514] “Membrane anchor” or “membrane tethering domain”, as that term is used herein, refers to a polypeptide or moiety, e.g., a myristoyl group, sufficient to anchor an extracellular or intracellular domain to the plasma membrane.

[0515] “Switch domain,” as that term is used herein, e.g., when referring to an RCAR, refers to an entity, typically a polypeptide-based entity, that, in the presence of a dimerization molecule, associates with another switch domain. The association results in a functional coupling of a first entity linked to, e.g., fused to, a first switch domain, and a second entity linked to, e.g., fused to, a second switch domain. A first and second switch domain are collectively referred to as a dimerization switch. In embodiments, the first and second switch domains are the same as one another, e.g., they are polypeptides having the same primary amino acid sequence, and are referred to collectively as a homodimerization switch. In embodiments, the first and second switch domains are different from one another, e.g., they are polypeptides having different primary amino acid sequences, and are referred to collectively as a heterodimerization switch. In embodiments, the switch is intracellular. In embodiments, the switch is extracellular. In embodiments, the switch domain is a polypeptide-based entity, e.g., FKBP or FRB-based, and the dimerization molecule is small molecule, e.g., a rapalogue. In embodiments, the switch domain is a polypeptide-based entity, e.g., an scFv that binds a myc peptide, and the dimerization molecule is a polypeptide, a fragment thereof, or a multimer of a polypeptide, e.g., a myc ligand or multimers of a myc ligand that bind to one or more myc scFvs. In embodiments, the switch domain is a polypeptide-based entity, e.g., myc receptor, and the dimerization molecule is an antibody or fragments thereof, e.g., myc antibody.

[0516] “Dimerization molecule,” as that term is used herein, e.g., when referring to an RCAR, refers to a molecule that promotes the association of a first switch domain with a second switch domain. In embodiments, the dimerization molecule does not naturally occur in the subject, or does not occur in concentrations that would result in significant dimerization. In embodiments, the dimerization molecule is a small molecule, e.g., rapamycin or a rapalogue, e.g., RAD001.

[0517] The term “low, immune enhancing, dose” when used in conjunction with an mTOR inhibitor, e.g., an allosteric mTOR inhibitor, e.g., RAD001 or rapamycin, or a catalytic mTOR inhibitor, refers to a dose of mTOR inhibitor that partially, but not fully, inhibits mTOR activity, e.g., as measured by the inhibition of P70 S6 kinase activity. Methods for evaluating mTOR activity, e.g., by inhibition of P70 S6 kinase, are discussed herein. The dose is insufficient to result in complete immune suppression but is sufficient to enhance the immune response. In an embodiment, the low, immune enhancing, dose of mTOR inhibitor results in a decrease in the number of PD-1 positive T cells and/or an increase in the number of PD-1 negative T cells, or an increase in the ratio of PD-1 negative T cells/PD-1 positive T cells. In an embodiment, the low, immune enhancing, dose of mTOR inhibitor results in an increase in the number of naïve T cells. In an embodiment, the low, immune enhancing, dose of mTOR inhibitor results in one or more of the following:

[0518] an increase in the expression of one or more of the following markers: CD62L^{high}, CD127^{high}, CD27⁺, and BCL2, e.g., on memory T cells, e.g., memory T cell precursors;

[0519] a decrease in the expression of KLRG1, e.g., on memory T cells, e.g., memory T cell precursors; and

[0520] an increase in the number of memory T cell precursors, e.g., cells with any one or combination of the following characteristics: increased CD62L^{high} increased CD127^{high}, increased CD27⁺, decreased KLRG1, and increased BCL2;

wherein any of the changes described above occurs, e.g., at least transiently, e.g., as compared to a non-treated subject.

[0521] Ranges: throughout this disclosure, various aspects of the invention can be presented in a range format. It should be understood that the description in range format is merely for convenience and brevity and should not be construed as an inflexible limitation on the scope of the invention. Accordingly, the description of a range should be considered to have specifically disclosed all the possible subranges as well as individual numerical values within that range. For example, description of a range such as from 1 to 6 should be considered to have specifically disclosed subranges such as from 1 to 3, from 1 to 4, from 1 to 5, from 2 to 4, from 2 to 6, from 3 to 6 etc., as well as individual numbers within that range, for example, 1, 2, 2.7, 3, 4, 5, 5.3, and 6. As another example, a range such as 95-99% identity, includes something with 95%, 96%, 97%, 98% or 99% identity, and includes subranges such as 96-99%, 96-98%, 96-97%, 97-99%, 97-98% and 98-99% identity. This applies regardless of the breadth of the range.

### Description

### CD19 Inhibitors, Binding Domains and CARs

[0522] Provided herein are compositions of matter and methods of use for the treatment of a disease such as cancer using CD19 chimeric antigen receptors (CAR). The methods include, inter alia, administering a CD19 CAR described herein in combination with another agent such as B-cell inhibitor. The methods also include, e.g., administering a CD19 CAR described herein to treat a lymphoma such as Hodgkin lymphoma.

[0523] In one aspect, the invention provides a number of chimeric antigen receptors (CAR) comprising an antibody or antibody fragment engineered for specific binding to a CD19 protein. In one aspect, the invention provides a cell (e.g., T cell) engineered to express a CAR, wherein the CAR T cell (“CART”) exhibits an anticancer property. In one aspect a cell is transformed with the CAR and the CAR is expressed on the cell surface. In some embodiments, the cell (e.g., T cell) is transduced with a viral vector encoding a CAR. In some embodiments, the viral vector is a retroviral vector. In some embodiments, the viral vector is a lentiviral vector. In some such embodiments, the cell may stably express the CAR. In another embodiment, the cell (e.g., T cell) is transfected with a nucleic acid, e.g., mRNA, cDNA, DNA, encoding a CAR. In some such embodiments, the cell may transiently express the CAR.

[0524] In one aspect, the anti-CD19 protein binding portion of the CAR is a scFv antibody fragment. In one aspect such antibody fragments are functional in that they retain the equivalent binding affinity, e.g., they bind the same antigen with comparable affinity, as the IgG antibody from which it is derived. In one aspect such antibody fragments are functional in that they provide a biological response that can include, but is not limited to, activation of an immune response, inhibition of signal-transduction origination from its target antigen, inhibition of kinase activity, and the like, as will be understood by a skilled artisan. In one aspect, the anti-CD19 antigen binding domain of the CAR is a scFv antibody fragment that is humanized compared to the murine sequence of the scFv from which it is derived. In one aspect, the parental murine scFv sequence is the CAR19 construct provided in PCT publication WO2012/079000 and provided herein as SEQ ID NO:59. In one embodiment, the anti-CD19 binding domain is a scFv described in WO2012/079000 and provided in SEQ ID NO:59, or a sequence at least 95%, e.g., 95-99%, identical thereto. In an embodiment, the anti-CD19 binding domain is part of a CAR construct provided in PCT publication WO2012/079000 and provided herein as SEQ ID NO:58, or a sequence at least 95%, e.g., 95%-99%, identical thereto. In an embodiment, the anti-CD19 binding domain comprises at least one (e.g., 2, 3, 4, 5, or 6) CDRs selected from Table 4 and/or Table 5.

[0525] In some aspects, the antibodies of the invention are incorporated into a chimeric antigen receptor (CAR). In one aspect, the CAR comprises the polypeptide sequence provided as SEQ ID NO: 12 in PCT publication WO2012/079000, and provided herein as SEQ ID NO: 58, wherein the scFv domain is substituted by one or more sequences selected from SEQ ID NOS: 1-12. In one aspect, the scFv domains of SEQ ID NOS:1-12 are humanized variants of the scFv domain of SEQ ID NO:59, which is an scFv fragment of murine origin that specifically binds to human CD19. Humanization of this mouse scFv may be desired for the clinical setting, where the mouse-specific residues may induce a human-anti-mouse antigen (HAMA) response in patients who receive CART19 treatment, e.g., treatment with T cells transduced with the CAR19 construct.

[0526] In one embodiment, the CD19 CAR comprises an amino acid sequence provided as SEQ ID NO: 12 in PCT publication WO2012/079000. In embodiment, the amino acid sequence is:

(SEQ ID NO: 58)
MALPVTALLLPLALLLHAARPdiqmtqttsslsaslgdrvtiscrasqd
iskylnwyqqkpdgtvklliyhtsrlhsgvpsrfsgsgsgtdysltisn
leqediatyfcqqgntlpytfgggtkleitggggsggggsggggsevkl
qesgpglvapsqslsvtctvsgvslpdygvswirqpprkglewlgviwg
settyynsalksrltiikdnsksqvflkmnslqtddtaiyycakhyyyg
gsyamdywgqgtsvtvsstttpaprpptpaptiasqplslrpeacrpaa
ggavhtrgldfacdiyiwaplagtcgvlllslvitlyckrgrkkllyif
kqpfmrpvqttqeedgcscrfpeeeeggcelrvkfsrsadapaykqgqn
qlynelnlgrreeydvldkrrgrdpemggkprrknpqeglynelqkdkm
aeayseigmkgerrrgkghdglyqglstatkdtydalhmqalppr,

substantially homologous thereto.

[0527] In embodiment, the amino acid sequence is

(SEQ ID NO: 1633)
diqmtqttsslsaslgdrvtiscrasqdiskylnwyqqkpdgtvklliy
htsrlhsgvpsrfsgsgsgtdysltisnleqediatyfcqqgntlpytf
gggtkleitggggsggggsggggsevklqesgpglvapsqslsvtctvs
gvslpdygvswirqpprkglewlgviwgsettyynsalksrltiikdns
ksqvflkmnslqtddtaiyycakhyyyggsyamdywgqgtsvtvssttt
paprpptpaptiasqplslrpeacrpaaggavhtrgldfacdiyiwapl
agtcgvlllslvitlyckrgrkkllyifkqpfmrpvqttqeedgcscrf
peeeeggcelrvkfsrsadapaykqgqnqlynelnlgrreeydvldkrr
grdpemggkprrknpqeglynelqkdkmaeayseigmkgerrrgkghdg
lyqglstatkdtydalhmqalppr,

or a sequence substantially homologous thereto.

[0528] In one embodiment, the CD19 CAR has the USAN designation TISAGENLECLEUCEL-T. In embodiments, CTL019 is made by a gene modification of T cells is mediated by stable insertion via transduction with a self-inactivating, replication deficient Lentiviral (LV) vector containing the CTL019 transgene under the control of the EF-1 alpha promoter. CTL019 can be a mixture of transgene positive and negative T cells that are delivered to the subject on the basis of percent transgene positive T cells.

[0529] In one aspect, the humanized CAR19 comprises the scFv portion provided in SEQ ID NO:1. In one aspect, the humanized CAR19 comprises the scFv portion provided in SEQ ID NO:2. In one aspect, the humanized CAR19 comprises the scFv portion provided in SEQ ID NO:3. In one aspect, the humanized CAR19 comprises the scFv portion provided in SEQ ID NO:4. In one aspect, the humanized CAR19 comprises the scFv portion provided in SEQ ID NO:5. In one aspect, the humanized CAR19 comprises the scFv portion provided in SEQ ID NO:6. In one aspect, the humanized CAR19 comprises the scFv portion provided in SEQ ID NO:7. In one aspect, the humanized CAR19 comprises the scFv portion provided in SEQ ID NO:8. In one aspect, the humanized CAR19 comprises the scFv portion provided in SEQ ID NO:9. In one aspect, the humanized CAR19 comprises the scFv portion provided in SEQ ID NO:10. In one aspect, the humanized CAR19 comprises the scFv portion provided in SEQ ID NO:11. In one aspect, the humanized CAR19 comprises the scFv portion provided in SEQ ID NO:12.

[0530] In one aspect, the CARs of the invention combine an antigen binding domain of a specific antibody with an intracellular signaling molecule. For example, in some aspects, the intracellular signaling molecule includes, but is not limited to, CD3-zeta chain, 4-1BB and CD28 signaling modules and combinations thereof. In one aspect, the CD19 CAR comprises a CAR selected from the sequence provided in one or more of SEQ ID NOS: 31-42. In one aspect, the CD19 CAR comprises the sequence provided in SEQ ID NO:31. In one aspect, the CD19 CAR comprises the sequence provided in SEQ ID NO:32. In one aspect, the CD19 CAR comprises the sequence provided in SEQ ID NO:33. In one aspect, the CD19 CAR comprises the sequence provided in SEQ ID NO:34. In one aspect, the CD19 CAR comprises the sequence provided in SEQ ID NO:35. In one aspect, the CD19 CAR comprises the sequence provided in SEQ ID NO:36. In one aspect, the CD19 CAR comprises the sequence provided in SEQ ID NO:37. In one aspect, the CD19 CAR comprises the sequence provided in SEQ ID NO:38. In one aspect, the CD19 CAR comprises the sequence provided in SEQ ID NO:39. In one aspect, the CD19 CAR comprises the sequence provided in SEQ ID NO:40. In one aspect, the CD19 CAR comprises the sequence provided in SEQ ID NO:41. In one aspect, the CD19 CAR comprises the sequence provided in SEQ ID NO:42.

[0531] In embodiments, the CAR molecule is a CD19 CAR molecule described herein, e.g., a humanized CAR molecule described herein, e.g., a humanized CD19 CAR molecule of Table 2 or having CDRs as set out in Tables 4 and 5.

[0532] In embodiments, the CAR molecule is a CD19 CAR molecule described herein, e.g., a murine CAR molecule described herein, e.g., a murine CD19 CAR molecule of Table 3 or having CDRs as set out in Tables 4 and 5.

[0533] In some embodiments, the CAR molecule comprises one, two, and/or three CDRs from the heavy chain variable region and/or one, two, and/or three CDRs from the light chain variable region of the murine or humanized CD19 CAR of Table 4 and 5.

[0534] In one embodiment, the antigen binding domain comprises one, two three (e.g., all three) heavy chain CDRs, HC CDR1, HC CDR2 and HC CDR3, from an antibody listed above, and/or one, two, three (e.g., all three) light chain CDRs, LC CDR1, LC CDR2 and LC CDR3, from an antibody listed above. In one embodiment, the antigen binding domain comprises a heavy chain variable region and/or a variable light chain region of an antibody listed or described above.

[0535] In an embodiment, the antigen binding domain comprises a humanized antibody or an antibody fragment. In one embodiment, the humanized anti-CD19 binding domain comprises one or more (e.g., all three) light chain complementary determining region 1 (LC CDR1), light chain complementary determining region 2 (LC CDR2), and light chain complementary determining region 3 (LC CDR3) of a murine or humanized anti-CD19 binding domain described herein, and/or one or more (e.g., all three) heavy chain complementary determining region 1 (HC CDR1), heavy chain complementary determining region 2 (HC CDR2), and heavy chain complementary determining region 3 (HC CDR3) of a murine or humanized anti-CD19 binding domain described herein, e.g., a humanized anti-CD19 binding domain comprising one or more, e.g., all three, LC CDRs and one or more, e.g., all three, HC CDRs.

[0536] In one embodiment, an antigen binding domain comprises one, two three (e.g., all three) heavy chain CDRs, HC CDR1, HC CDR2 and HC CDR3, from an antibody listed herein, e.g., in Table 2, 4, or 5 and/or one, two, three (e.g., all three) light chain CDRs, LC CDR1, LC CDR2 and LC CDR3, from an antibody listed herein, e.g., in Table 2, 4, or 5. In one embodiment, the antigen binding domain comprises a heavy chain variable region and/or a variable light chain region of an antibody listed or described above.

[0537] In an embodiment, the CD19 binding domain (e.g., an scFv) comprises: a light chain variable region comprising an amino acid sequence having at least one, two or three modifications (e.g., substitutions) but not more than 30, 20 or 10 modifications (e.g., substitutions) of an amino acid sequence of a light chain variable region provided in Table 2, or a sequence with 95-99% identity with an amino acid sequence of Table 2; and/or a heavy chain variable region comprising an amino acid sequence having at least one, two or three modifications (e.g., substitutions) but not more than 30, 20 or 10 modifications (e.g., substitutions) of an amino acid sequence of a heavy chain variable region provided in Table 2, or a sequence with 95-99% identity to an amino acid sequence of Table 2. In embodiments, the CD19 binding domain comprises one or more CDRs (e.g., one each of a HC CDR1, HC CDR2, HC CDR3, LC CDR1, LC CDR2, and LC CDR3) of Table 4 or Table 5, or CDRs having one, two, three, four, five, or six modifications (e.g., substitutions) of one or more of the CDRs.

[0538] Exemplary anti-CD19 antibody molecules (including antibodies or fragments or conjugates thereof) can include a scFv, CDRs, or VH and VL chains described in Tables 2, 4, or 5. In an embodiment, the CD19-binding antibody molecule comprises: alight chain variable region comprising an amino acid sequence having at least one, two or three modifications (e.g., substitutions) but not more than 30, 20 or 10 modifications (e.g., substitutions) of an amino acid sequence of a light chain variable region provided in Table 2, or a sequence with 95-99% identity with an amino acid sequence of Table 2; and/or a heavy chain variable region comprising an amino acid sequence having at least one, two or three modifications (e.g., substitutions) but not more than 30, 20 or 10 modifications (e.g., substitutions) of an amino acid sequence of a heavy chain variable region provided in Table 2, or a sequence with 95-99% identity to an amino acid sequence of Table 2. In embodiments, the CD19-binding antibody molecule comprises one or more CDRs (e.g., one each of a HC CDR1, HC CDR2, HC CDR3, LC CDR1, LC CDR2, and LC CDR3) of Table 4 or Table 5, or CDRs having one, two, three, four, five, or six modifications (e.g., substitutions) of one or more of the CDRs. The antibody molecule may be, e.g., an isolated antibody molecule.

[0539] In some embodiments, the humanized anti-CD19 binding domain comprises a HC CDR1, a HC CDR2, and a HC CDR3 of any heavy chain binding domain amino acid sequences listed in Table 2. In embodiments, the antigen binding domain further comprises a LC CDR1, a LC CDR2, and a LC CDR3. In embodiments, the antigen binding domain comprises a LC CDR1, a LC CDR2, and a LC CDR3 of any light chain binding domain amino acid sequences listed in Table 2.

[0540] In some embodiments, the antigen binding domain comprises one, two or all of LC CDR1, LC CDR2, and LC CDR3 of any light chain binding domain amino acid sequences listed in Table 2, and one, two or all of HC CDR1, HC CDR2, and HC CDR3 of any heavy chain binding domain amino acid sequences listed in Table 2.

[0541] In some embodiments, the CDRs are defined according to the Kabat numbering scheme, the Chothia numbering scheme, or a combination thereof.

[0542] The sequences of humanized CDR sequences of the scFv domains are shown in Table 4 for the heavy chain variable domains and in Table 5 for the light chain variable domains. “ID” stands for the respective SEQ ID NO for each CDR.

[0543] In some embodiments, the CD19 binding domain comprises a Kabat HCDR1 having a sequence of DYGVS (SEQ ID NO: 1634), an HCDR2 of Table 4, an HCDR3 of Table 4, an LCDR1 of Table 5, an LCDR2 of Table 5, and an LCDR3 of Table 5.

[0544] In one embodiment, the humanized anti-CD19 binding domain comprises a sequence selected from a group consisting of SEQ ID NO:1, SEQ ID NO:2, SEQ ID NO:3, SEQ ID NO:4, SEQ ID NO:5, SEQ ID NO:6, SEQ ID NO:7, SEQ ID NO:8, SEQ ID NO:9, SEQ ID NO:10, SEQ ID NO:11, and SEQ ID NO:12, or a sequence with 95-99% identity thereof. In one embodiment, the nucleic acid sequence encoding the humanized anti-CD19 binding domain comprises a sequence selected from a group consisting of SEQ ID NO:61, SEQ ID NO:62, SEQ ID NO:63, SEQ ID NO:64, SEQ ID NO:65, SEQ ID NO:66, SEQ ID NO:67, SEQ ID NO:68, SEQ ID NO:70, SEQ ID NO:71 and SEQ ID NO:72, or a sequence with 95-99% identity thereof.

[0545] In one embodiment, the humanized anti-CD19 binding domain is a scFv, and a light chain variable region comprising an amino acid sequence described herein, e.g., in Table 2, is attached to a heavy chain variable region comprising an amino acid sequence described herein, e.g., in Table 2, via a linker, e.g., a linker described herein. In one embodiment, the humanized anti-CD19 binding domain includes a (Gly₄-Ser)n linker, wherein n is 1, 2, 3, 4, 5, or 6, e.g., 3 or 4 (SEQ ID NO:53). The light chain variable region and heavy chain variable region of a scFv can be, e.g., in any of the following orientations: light chain variable region-linker-heavy chain variable region or heavy chain variable region-linker-light chain variable region.

[0546] In one aspect, the antigen binding domain portion comprises one or more sequence selected from SEQ ID NOS:1-12. In one aspect the humanized CAR is selected from one or more sequence selected from SEQ ID NOS: 31-42. In some aspects, a non-human antibody is humanized, where specific sequences or regions of the antibody are modified to increase similarity to an antibody naturally produced in a human or fragment thereof.

[0547] In one embodiment, the anti-CD19 binding domain comprises a murine light chain variable region described herein (e.g., in Table 3) and/or a murine heavy chain variable region described herein (e.g., in Table 3). In one embodiment, the anti-CD19 binding domain is a scFv comprising a murine light chain and a murine heavy chain of an amino acid sequence of Table 3. In an embodiment, the anti-CD19 binding domain (e.g., an scFv) comprises: a light chain variable region comprising an amino acid sequence having at least one, two or three modifications (e.g., substitutions) but not more than 30, 20 or 10 modifications (e.g., substitutions) of an amino acid sequence of a light chain variable region provided in Table 3, or a sequence with 95-99% identity with an amino acid sequence of Table 3; and/or a heavy chain variable region comprising an amino acid sequence having at least one, two or three modifications (e.g., substitutions) but not more than 30, 20 or 10 modifications (e.g., substitutions) of an amino acid sequence of a heavy chain variable region provided in Table 3, or a sequence with 95-99% identity to an amino acid sequence of Table 3. In one embodiment, the anti-CD19 binding domain comprises a sequence of SEQ ID NO:59, or a sequence with 95-99% identity thereof. In one embodiment, the anti-CD19 binding domain is a scFv, and a light chain variable region comprising an amino acid sequence described herein, e.g., in Table 3, is attached to a heavy chain variable region comprising an amino acid sequence described herein, e.g., in Table 3, via a linker, e.g., a linker described herein. In one embodiment, the antigen binding domain includes a (Gly₄-Ser)n linker, wherein n is 1, 2, 3, 4, 5, or 6, e.g., 3 or 4 (SEQ ID NO: 53). The light chain variable region and heavy chain variable region of a scFv can be, e.g., in any of the following orientations: light chain variable region-linker-heavy chain variable region or heavy chain variable region-linker-light chain variable region.

[0548] In embodiments, the CAR molecule comprises a CD19 inhibitor comprising an antibody or antibody fragment which includes a CD19 binding domain, a transmembrane domain, and an intracellular signaling domain comprising a stimulatory domain, and wherein said CD19 binding domain comprises one or more of (e.g., all three of) light chain complementary determining region 1 (LC CDR1), light chain complementary determining region 2 (LC CDR2), and light chain complementary determining region 3 (LC CDR3) of any CD19 light chain binding domain amino acid sequence listed in Tables 2 or 3, and one or more of (e.g., all three of) heavy chain complementary determining region 1 (HC CDR1), heavy chain complementary determining region 2 (HC CDR2), and heavy chain complementary determining region 3 (HC CDR3) of any CD19 heavy chain binding domain amino acid sequence listed in Tables 2 or 3.

[0549] In embodiments, a CD19 CAR comprises light chain variable region listed in Tables 2 or 3 and any heavy chain variable region listed Tables 2 or 3.

[0550] In embodiments, the CD19 inhibitor comprises a CD19 binding domain which comprises a sequence selected from a group consisting of SEQ ID NO:1, SEQ ID NO:2, SEQ ID NO:3, SEQ ID NO: 4, SEQ ID NO:5, SEQ ID NO:6, SEQ ID NO:7, SEQ ID NO:8, SEQ ID NO:9, SEQ ID NO:10, SEQ ID NO:11 and SEQ ID NO:12, or a sequence with 95-99% identity thereof. In embodiments, the CD19 CAR comprises a polypeptide of SEQ ID NO:58.

[0551] In one embodiment, the CAR molecule comprises an anti-CD19 binding domain comprising one or more (e.g., all three) light chain complementary determining region 1 (LC CDR1), light chain complementary determining region 2 (LC CDR2), and light chain complementary determining region 3 (LC CDR3) of an anti-CD19 binding domain described herein, and one or more (e.g., all three) heavy chain complementary determining region 1 (HC CDR1), heavy chain complementary determining region 2 (HC CDR2), and heavy chain complementary determining region 3 (HC CDR3) of an anti-CD19 binding domain described herein, e.g., an anti-CD19 binding domain comprising one or more, e.g., all three, LC CDRs and one or more, e.g., all three, HC CDRs. In one embodiment, the anti-CD19 binding domain comprises one or more (e.g., all three) heavy chain complementary determining region 1 (HC CDR1), heavy chain complementary determining region 2 (HC CDR2), and heavy chain complementary determining region 3 (HC CDR3) of an anti-CD19 binding domain described herein, e.g., the anti-CD19 binding domain has two variable heavy chain regions, each comprising a HC CDR1, a HC CDR2 and a HC CDR3 described herein.

[0552] In one aspect, the anti-CD19 binding domain is characterized by particular functional features or properties of an antibody or antibody fragment. For example, in one aspect, the portion of a CAR composition of the invention that comprises an antigen binding domain specifically binds human CD19. In one aspect, the invention relates to an antigen binding domain comprising an antibody or antibody fragment, wherein the antibody binding domain specifically binds to a CD19 protein or fragment thereof, wherein the antibody or antibody fragment comprises a variable light chain and/or a variable heavy chain that includes an amino acid sequence of SEQ ID NO: 1-12 or SEQ ID NO:59. In one aspect, the antigen binding domain comprises an amino acid sequence of an scFv selected from SEQ ID NOs: 1-12 or SEQ ID NO:59. In certain aspects, the scFv is contiguous with and in the same reading frame as a leader sequence. In one aspect the leader sequence is the polypeptide sequence provided as SEQ ID NO:13.

[0553] In one aspect, the portion of the CAR comprising the antigen binding domain comprises an antigen binding domain that targets CD19. In one aspect, the antigen binding domain targets human CD19. In one aspect, the antigen binding domain of the CAR has the same or a similar binding specificity as, or includes, the FMC63 scFv fragment described in Nicholson et al. Mol. Immun. 34 (16-17): 1157-1165 (1997). In one aspect, the portion of the CAR comprising the antigen binding domain comprises an antigen binding domain that targets a B-cell antigen, e.g., a human B-cell antigen. A CD19 antibody molecule can be, e.g., an antibody molecule (e.g., a humanized anti-CD19 antibody molecule) described in WO2014/153270, which is incorporated herein by reference in its entirety. WO2014/153270 also describes methods of assaying the binding and efficacy of various CART constructs.

[0554] In some embodiments, the CD19 CAR comprises an antigen binding domain derived from (e.g., comprises an amino acid sequence of) an anti-CD19 antibody (e.g., an anti-CD19 mono- or bispecific antibody) or a fragment or conjugate thereof. In one embodiment, the anti-CD19 antibody is a humanized antigen binding domain as described in WO2014/153270 (e.g., Table 3 of WO2014/153270) incorporated herein by reference, or a conjugate thereof. Other exemplary anti-CD19 antibodies or fragments or conjugates thereof, include but are not limited to, a bispecific T cell engager that targets CD19 (e.g., blinatumomab), SAR3419 (Sanofi), MEDI-551 (MedImmune LLC), Combotox, DT2219ARL (Masonic Cancer Center), MOR-208 (also called XmAb-5574; MorphoSys), XmAb-5871 (Xencor), MDX-1342 (Bristol-Myers Squibb), SGN-CD19A (Seattle Genetics), and AFM11 (Affimed Therapeutics). See, e.g., Hammer. MAbs. 4.5(2012): 571-77. Blinatomomab is a bispecific antibody comprised of two scFvs-one that binds to CD19 and one that binds to CD3. Blinatomomab directs T cells to attack cancer cells. See, e.g., Hammer et al.; Clinical Trial Identifier No. NCT00274742 and NCT01209286. MEDI-551 is a humanized anti-CD19 antibody with a Fc engineered to have enhanced antibody-dependent cell-mediated cytotoxicity (ADCC). See, e.g., Hammer et al.; and Clinical Trial Identifier No. NCT01957579. Combotox is a mixture of immunotoxins that bind to CD19 and CD22. The immunotoxins are made up of scFv antibody fragments fused to a deglycosylated ricin A chain. See, e.g., Hammer et al.; and Herrera et al. J. Pediatr. Hematol. Oncol. 31.12(2009):936-41; Schindler et al. Br. J. Haematol. 154.4(2011):471-6. DT2219ARL is a bispecific immunotoxin targeting CD19 and CD22, comprising two scFvs and a truncated diphtheria toxin. See, e.g., Hammer et al.; and Clinical Trial Identifier No. NCT00889408. SGN-CD19A is an antibody-drug conjugate (ADC) comprised of an anti-CD19 humanized monoclonal antibody linked to a synthetic cytotoxic cell-killing agent, monomethyl auristatin F (MMAF). See, e.g., Hammer et al.; and Clinical Trial Identifier Nos. NCT01786096 and NCT01786135. SAR3419 is an anti-CD19 antibody-drug conjugate (ADC) comprising an anti-CD19 humanized monoclonal antibody conjugated to a maytansine derivative via a cleavable linker. See, e.g., Younes et al. J. Clin. Oncol. 30.2(2012): 2776-82; Hammer et al.; Clinical Trial Identifier No. NCT00549185; and Blanc et al. Clin Cancer Res. 2011; 17:6448-58. XmAb-5871 is an Fc-engineered, humanized anti-CD19 antibody. See, e.g., Hammer et al. MDX-1342 is a human Fc-engineered anti-CD19 antibody with enhanced ADCC. See, e.g., Hammer et al. In embodiments, the antibody molecule is a bispecific anti-CD19 and anti-CD3 molecule. For instance, AFM11 is a bispecific antibody that targets CD19 and CD3. See, e.g., Hammer et al.; and Clinical Trial Identifier No. NCT02106091. In some embodiments, an anti-CD19 antibody described herein is conjugated or otherwise bound to a therapeutic agent, e.g., a chemotherapeutic agent, peptide vaccine (such as that described in Izumoto et al. 2008 J Neurosurg 108:963-971), immunosuppressive agent, or immunoablative agent, e.g., cyclosporin, azathioprine, methotrexate, mycophenolate, FK506, CAMPATH, anti-CD3 antibody, cytoxin, fludarabine, rapamycin, mycophenolic acid, steroid, FR901228, or cytokine.

[0555] In one embodiment, an antigen binding domain against CD19 is an antigen binding portion, e.g., CDRs, of an antigen binding domain described in a Table herein. In one embodiment, a CD19 antigen binding domain can be from any CD19 CAR, e.g., LG-740; U.S. Pat. Nos. 8,399,645; 7,446,190; Xu et al., Leuk Lymphoma. 2013 54(2):255-260(2012); Cruz et al., Blood 122(17):2965-2973 (2013); Brentjens et al., Blood, 118(18):4817-4828 (2011); Kochenderfer et al., Blood 116(20):4099-102 (2010); Kochenderfer et al., Blood 122 (25):4129-39(2013); and 16th Annu Meet Am Soc Gen Cell Ther (ASGCT) (May 15-18, Salt Lake City) 2013, Abst 10, each of which is herein incorporated by reference in its entirety.

[0556] In embodiments, the CAR molecule comprises a CD19 CAR molecule described herein, e.g., a CD19 CAR molecule described in US-2015-0283178-A1, e.g., CTL019. In embodiments, the CD19 CAR comprises an amino acid, or has a nucleotide sequence shown in US-2015-0283178-A1, incorporated herein by reference.

[0557] In one aspect, the invention provides a cell (e.g., T cell) engineered to express a chimeric antigen receptor (CAR), wherein the CAR-expressing cell, e.g., CAR T cell (“CART”) exhibits an anticancer property. A suitable antigen is CD19. In one aspect, the antigen binding domain of the CAR comprises a partially humanized anti-CD19 antibody fragment. In one aspect, the antigen binding domain of the CAR comprises a partially humanized anti-CD19 antibody fragment comprising an scFv. Accordingly, the invention provides (among other things) a CD19-CAR that comprises a humanized anti-CD19 binding domain and is engineered into an immune effector cell, e.g., a T cell or an NK cell, and methods of their use for adoptive therapy.

[0558] In one aspect, the CAR, e.g., CD19-CAR comprises at least one intracellular domain selected from the group of a CD137 (4-1BB) signaling domain, a CD28 signaling domain, a CD3zeta signal domain, and any combination thereof. In one aspect, the CAR, e.g., CD19-CAR comprises at least one intracellular signaling domain is from one or more co-stimulatory molecule(s) other than a CD137 (4-1BB) or CD28.

### Exemplary CD19 CAR Constructs

[0559] Of the CD19 CAR constructs described in International Application WO2014/153270, certain sequences are reproduced herein. It is understood that the sequences in this section can also be used in the context of other CARs, e.g., BCMA CARs.

[0560] The sequences of the murine scFv fragments (SEQ ID NOS: 98, 109, 111 and 114) are provided below in Table 3. Full CAR constructs were generated using SEQ ID NOs: 98, 109, 111 and 114 with additional sequences, SEQ ID NOs: 13-17, shown below, to generate full CAR constructs with SEQ ID NOs: 58, 110, 112, 113 and 115.

[0561] The sequences of the humanized scFv fragments (SEQ ID NOS: 1-12) are provided below in Table 2. Full CAR constructs were generated using SEQ ID NOs: 1-12 with additional sequences, SEQ ID NOs: 13-17, shown below, to generate full CAR constructs with SEQ ID NOs: 31-42.

leader (amino acid sequence)
(SEQ ID NO: 13)
MALPVTALLLPLALLLHAARP
leader (nucleic acid sequence)
(SEQ ID NO: 54)
ATGGCCCTGCCTGTGACAGCCCTGCTGCTGCCTCTGGCTCTGCTGCTGCA
TGCCGCTAGACCC
CD8 hinge (amino acid sequence)
(SEQ ID NO: 14)
TTTPAPRPPTPAPTIASQPLSLRPEACRPAAGGAVHTRGLDFACD
CD8 hinge (nucleic acid sequence)
(SEQ ID NO: 55)
ACCACGACGCCAGCGCCGCGACCACCAACACCGGCGCCCACCATCGCGTC
GCAGCCCCTGTCCCTGCGCCCAGAGGCGTGCCGGCCAGCGGCGGGGGGCG
CAGTGCACACGAGGGGGCTGGACTTCGCCTGTGAT
CD8 transmembrane (amino acid sequence)
(SEQ ID NO: 15)
IYIWAPLAGTCGVLLLSLVITLYC
transmembrane (nucleic acid sequence)
(SEQ ID NO: 56)
ATCTACATCTGGGCGCCCTTGGCCGGGACTTGTGGGGTCCTTCTCCTGTC
ACTGGTTATCACCCTTTACTGC
4-1BB Intracellular domain (amino acid sequence)
(SEQ ID NO: 16)
KRGRKKLLYIFKQPFMRPVQTTQEEDGCSCRFPEEEEGGCEL
4-1BB Intracellular domain (nucleic acid sequence)
(SEQ ID NO: 60)
AAACGGGGCAGAAAGAAACTCCTGTATATATTCAAACAACCATTTATGAG
ACCAGTACAAACTACTCAAGAGGAAGATGGCTGTAGCTGCCGATTTCCAG
AAGAAGAAGAAGGAGGATGTGAACTG
CD3 zeta domain (amino acid sequence)
(SEQ ID NO: 17)
RVKFSRSADAPAYKQGQNQLYNELNLGRREEYDVLDKRRGRDPEMGGKPR
RKNPQEGLYNELQKDKMAEAYSEIGMKGERRRGKGHDGLYQGLSTATKDT
YDALHMQALPPR
CD3 zeta (nucleic acid sequence)
(SEQ ID NO: 101)
AGAGTGAAGTTCAGCAGGAGCGCAGACGCCCCCGCGTACAAGCAGGGCCA
GAACCAGCTCTATAACGAGCTCAATCTAGGACGAAGAGAGGAGTACGATG
TTTTGGACAAGAGACGTGGCCGGGACCCTGAGATGGGGGGAAAGCCGAGA
AGGAAGAACCCTCAGGAAGGCCTGTACAATGAACTGCAGAAAGATAAGAT
GGCGGAGGCCTACAGTGAGATTGGGATGAAAGGCGAGCGCCGGAGGGGCA
AGGGGCACGATGGCCTTTACCAGGGTCTCAGTACAGCCACCAAGGACACC
TACGACGCCCTTCACATGCAGGCCCTGCCCCCTCGC
CD3 zeta domain (amino acid sequence; NCBI
Reference Sequence NM_000734.3)
(SEQ ID NO: 43)
RVKFSRSADAPAYQQGQNQLYNELNLGRREEYDVLDKRRGRDPEMGGKPR
RKNPQEGLYNELQKDKMAEAYSEIGMKGERRRGKGHDGLYQGLSTATKDT
YDALHMQALPPR
CD3 zeta (nucleic acid sequence; NCBI Reference
Sequence NM_000734.3);
(SEQ ID NO: 44)
AGAGTGAAGTTCAGCAGGAGCGCAGACGCCCCCGCGTACCAGCAGGGCCA
GAACCAGCTCTATAACGAGCTCAATCTAGGACGAAGAGAGGAGTACGATG
TTTTGGACAAGAGACGTGGCCGGGACCCTGAGATGGGGGGAAAGCCGAGA
AGGAAGAACCCTCAGGAAGGCCTGTACAATGAACTGCAGAAAGATAAGAT
GGCGGAGGCCTACAGTGAGATTGGGATGAAAGGCGAGCGCCGGAGGGGCA
AGGGGCACGATGGCCTTTACCAGGGTCTCAGTACAGCCACCAAGGACACC
TACGACGCCCTTCACATGCAGGCCCTGCCCCCTCGC
CD28 domain
(amino acid sequence, SEQ ID NO: 1317)
RSKRSRLLHSDYMNMTPRRPGPTRKHYQPYAPPRDFAAYRS
CD28 domain
(nucleotide sequence, SEQ ID NO: 1318)
AGGAGTAAGAGGAGCAGGCTCCTGCACAGTGACTACATGAACATGACTCC
CCGCCGCCCCGGGCCCACCCGCAAGCATTACCAGCCCTATGCCCCACCAC
GCGACTTCGCAGCCTATCGCTCC
Wild-type ICOS domain
(amino acid sequence, SEQ ID NO: 1319)
TKKKYSSSVHDPNGEYMFMRAVNTAKKSRLTDVTL
Wild-type ICOS domain
(nucleotide sequence, SEQ ID NO: 1320)
ACAAAAAAGAAGTATTCATCCAGTGTGCACGACCCTAACGGTGAATACAT
GTTCATGAGAGCAGTGAACACAGCCAAAAAATCCAGACTCACAGATGTGA
CCCTA
Y to F mutant ICOS domain
(amino acid sequence, SEQ ID NO: 1321)
TKKKYSSSVHDPNGEFMFMRAVNTAKKSRLTDVTL
IgG4 Hinge (amino acid sequence)
(SEQ ID NO: 102)
ESKYGPPCPPCPAPEFLGGPSVFLFPPKPKDTLMISRTPEVTCVVVDVSQ
EDPEVQFNWYVDGVEVHNAKTKPREEQFNSTYRVVSVLTVLHQDWLNGKE
YKCKVSNKGLPSSIEKTISKAKGQPREPQVYTLPPSQEEMTKNQVSLTCL
VKGFYPSDIAVEWESNGQPENNYKTTPPVLDSDGSFFLYSRLTVDKSRWQ
EGNVFSCSVMHEALHNHYTQKSLSLSLGKM
IgG4 Hinge (nucleotide sequence)
(SEQ ID NO: 103)
GAGAGCAAGTACGGCCCTCCCTGCCCCCCTTGCCCTGCCCCCGAGTTCCT
GGGCGGACCCAGCGTGTTCCTGTTCCCCCCCAAGCCCAAGGACACCCTGA
TGATCAGCCGGACCCCCGAGGTGACCTGTGTGGTGGTGGACGTGTCCCAG
GAGGACCCCGAGGTCCAGTTCAACTGGTACGTGGACGGCGTGGAGGTGCA
CAACGCCAAGACCAAGCCCCGGGAGGAGCAGTTCAATAGCACCTACCGGG
TGGTGTCCGTGCTGACCGTGCTGCACCAGGACTGGCTGAACGGCAAGGAA
TACAAGTGTAAGGTGTCCAACAAGGGCCTGCCCAGCAGCATCGAGAAAAC
CATCAGCAAGGCCAAGGGCCAGCCTCGGGAGCCCCAGGTGTACACCCTGC
CCCCTAGCCAAGAGGAGATGACCAAGAACCAGGTGTCCCTGACCTGCCTG
GTGAAGGGCTTCTACCCCAGCGACATCGCCGTGGAGTGGGAGAGCAACGG
CCAGCCCGAGAACAACTACAAGACCACCCCCCCTGTGCTGGACAGCGACG
GCAGCTTCTTCCTGTACAGCCGGCTGACCGTGGACAAGAGCCGGTGGCAG
GAGGGCAACGTCTTTAGCTGCTCCGTGATGCACGAGGCCCTGCACAACCA
CTACACCCAGAAGAGCCTGAGCCTGTCCCTGGGCAAGATG

[0562] The CAR scFv fragments were then cloned into lentiviral vectors to create a full length CAR construct in a single coding frame, and using the EF1 alpha promoter for expression (SEQ ID NO: 100).

EF-1 alpha promoter
(SEQ ID NO: 100)
CGTGAGGCTCCGGTGCCCGTCAGTGGGCAGAGCGCACATCGCCCACAGTC
CCCGAGAAGTTGGGGGGAGGGGTCGGCAATTGAACCGGTGCCTAGAGAAG
GTGGCGCGGGGTAAACTGGGAAAGTGATGTCGTGTACTGGCTCCGCCTTT
TTCCCGAGGGTGGGGGAGAACCGTATATAAGTGCAGTAGTCGCCGTGAAC
GTTCTTTTTCGCAACGGGTTTGCCGCCAGAACACAGGTAAGTGCCGTGTG
TGGTTCCCGCGGGCCTGGCCTCTTTACGGGTTATGGCCCTTGCGTGCCTT
GAATTACTTCCACCTGGCTGCAGTACGTGATTCTTGATCCCGAGCTTCGG
GTTGGAAGTGGGTGGGAGAGTTCGAGGCCTTGCGCTTAAGGAGCCCCTTC
GCCTCGTGCTTGAGTTGAGGCCTGGCCTGGGCGCTGGGGCCGCCGCGTGC
GAATCTGGTGGCACCTTCGCGCCTGTCTCGCTGCTTTCGATAAGTCTCTA
GCCATTTAAAATTTTTGATGACCTGCTGCGACGCTTTTTTTCTGGCAAGA
TAGTCTTGTAAATGCGGGCCAAGATCTGCACACTGGTATTTCGGTTTTTG
GGGCCGCGGGCGGCGACGGGGCCCGTGCGTCCCAGCGCACATGTTCGGCG
AGGCGGGGCCTGCGAGCGCGGCCACCGAGAATCGGACGGGGGTAGTCTCA
AGCTGGCCGGCCTGCTCTGGTGCCTGGCCTCGCGCCGCCGTGTATCGCCC
CGCCCTGGGCGGCAAGGCTGGCCCGGTCGGCACCAGTTGCGTGAGCGGAA
AGATGGCCGCTTCCCGGCCCTGCTGCAGGGAGCTCAAAATGGAGGACGCG
GCGCTCGGGAGAGCGGGCGGGTGAGTCACCCACACAAAGGAAAAGGGCCT
TTCCGTCCTCAGCCGTCGCTTCATGTGACTCCACGGAGTACCGGGCGCCG
TCCAGGCACCTCGATTAGTTCTCGAGCTTTTGGAGTACGTCGTCTTTAGG
TTGGGGGGAGGGGTTTTATGCGATGGAGTTTCCCCACACTGAGTGGGTGG
AGACTGAAGTTAGGCCAGCTTGGCACTTGATGTAATTCTCCTTGGAATTT
GCCCTTTTTGAGTTTGGATCTTGGTTCATTCTCAAGCCTCAGACAGTGGT
TCAAAGTTTTTTTCTTCCATTTCAGGTGTCGTGA.

[0563] In embodiments, these clones contain a Q/K residue change in the signal domain of the co-stimulatory domain derived from 4-1BB.

[0564] In one aspect, the anti-CD19 binding domain, e.g., humanized scFv, portion of a CAR of the invention is encoded by a transgene whose sequence has been codon optimized for expression in a mammalian cell. In one aspect, entire CAR construct of the invention is encoded by a transgene whose entire sequence has been codon optimized for expression in a mammalian cell. Codon optimization refers to the discovery that the frequency of occurrence of synonymous codons (i.e., codons that code for the same amino acid) in coding DNA is biased in different species. Such codon degeneracy allows an identical polypeptide to be encoded by a variety of nucleotide sequences. A variety of codon optimization methods is known in the art, and include, e.g., methods disclosed in at least U.S. Pat. Nos. 5,786,464 and 6,114,148.

[0565] The present disclosure encompasses, but is not limited to, a recombinant DNA construct comprising sequences encoding a CAR, wherein the CAR comprises an antibody or antibody fragment that binds specifically to CD19, wherein the sequence of the antibody fragment is contiguous with and in the same reading frame as a nucleic acid sequence encoding an intracellular signaling domain. The intracellular signaling domain can comprise a costimulatory signaling domain and/or a primary signaling domain, e.g., a zeta chain. The costimulatory signaling domain refers to a portion of the CAR comprising at least a portion of the intracellular domain of a costimulatory molecule. In one embodiment, the antigen binding domain is a murine antibody or antibody fragment described herein. In one embodiment, the antigen binding domain is a humanized antibody or antibody fragment.

[0566] In specific aspects, a CAR construct of the invention comprises a scFv domain selected from the group consisting of SEQ ID NOS:1-12 or an scFV domain of SEQ ID NO:59, wherein the scFv may be preceded by an optional leader sequence such as provided in SEQ ID NO: 13, and followed by an optional hinge sequence such as provided in SEQ ID NO:14 or SEQ ID NO:45 or SEQ ID NO:47 or SEQ ID NO:49, a transmembrane region such as provided in SEQ ID NO:15, an intracellular signalling domain that includes SEQ ID NO:16 or SEQ ID NO:51 and a CD3 zeta sequence that includes SEQ ID NO:17 or SEQ ID NO:43, wherein the domains are contiguous with and in the same reading frame to form a single fusion protein.

[0567] Also included in the invention (among other things) is a nucleotide sequence that encodes the polypeptide of each of the scFv fragments selected from the group consisting of SEQ IS NO:1, SEQ ID NO:2, SEQ ID NO:3, SEQ ID NO:4, SEQ ID NO:5, SEQ IS NO:6, SEQ ID NO:7, SEQ ID NO:8, SEQ ID NO:9, SEQ ID NO:10, SEQ ID NO:11, SEQ ID NO:12 and SEQ ID NO:59. Also included in the invention (among other things) is a nucleotide sequence that encodes the polypeptide of each of the scFv fragments selected from the group consisting of SEQ IS NO:1, SEQ ID NO:2, SEQ ID NO:3, SEQ ID NO:4, SEQ ID NO:5, SEQ ID NO:6, SEQ ID NO:7, SEQ ID NO:8, SEQ ID NO:9, SEQ ID NO:10, SEQ ID NO:11, SEQ ID NO:12 and SEQ ID NO:59, and each of the domains of SEQ ID NOS: 13-17, plus an encoded CD19 CAR fusion protein of the invention. In one aspect an exemplary CD19 CAR constructs comprise an optional leader sequence, an extracellular antigen binding domain, a hinge, a transmembrane domain, and an intracellular stimulatory domain. In one aspect an exemplary CD19 CAR construct comprises an optional leader sequence, an extracellular antigen binding domain, a hinge, a transmembrane domain, an intracellular costimulatory domain and an intracellular stimulatory domain. In some embodiments, specific CD19 CAR constructs containing humanized scFv domains of the invention are provided as SEQ ID NOS: 31-42, or a murine scFv domain as provided as SEQ ID NO:59.

[0568] In one aspect the nucleic acid sequence of a CAR construct of the invention is selected from one or more of SEQ ID NOS:85-96. In one aspect the nucleic acid sequence of a CAR construct is SEQ ID NO:85. In one aspect the nucleic acid sequence of a CAR construct is SEQ ID NO:86. In one aspect the nucleic acid sequence of a CAR construct is SEQ ID NO:87. In one aspect the nucleic acid sequence of a CAR construct is SEQ ID NO:88. In one aspect the nucleic acid sequence of a CAR construct is SEQ ID NO:89. In one aspect the nucleic acid sequence of a CAR construct is SEQ ID NO:90. In one aspect the nucleic acid sequence of a CAR construct is SEQ ID NO:91. In one aspect the nucleic acid sequence of a CAR construct is SEQ ID NO:92. In one aspect the nucleic acid sequence of a CAR construct is SEQ ID NO:93. In one aspect the nucleic acid sequence of a CAR construct is SEQ ID NO:94. In one aspect the nucleic acid sequence of a CAR construct is SEQ ID NO:95. In one aspect the nucleic acid sequence of a CAR construct is SEQ ID NO:96. In one aspect the nucleic acid sequence of a CAR construct is SEQ ID NO:97. In one aspect the nucleic acid sequence of a CAR construct is SEQ ID NO:98. In one aspect the nucleic acid sequence of a CAR construct is SEQ ID NO:99.

[0569] Full-length CAR sequences are also provided herein as SEQ ID NOS: 31-42 and 58, as shown in Table 2 (e.g., CTL119) and Table 3 (e.g., CTL019).

[0570] An exemplary leader sequence is provided as SEQ ID NO: 13. An exemplary hinge/spacer sequence is provided as SEQ ID NO: 14 or SEQ ID NO:45 or SEQ ID NO:47 or SEQ ID NO:49. An exemplary transmembrane domain sequence is provided as SEQ ID NO:15. An exemplary sequence of the intracellular signaling domain of the 4-1BB protein is provided as SEQ ID NO: 16. An exemplary sequence of the intracellular signaling domain of CD27 is provided as SEQ ID NO:51. An exemplary CD3zeta domain sequence is provided as SEQ ID NO: 17 or SEQ ID NO:43. These sequences may be used, e.g., in combination with an scFv that recognizes one or more of CD19, CD10, CD20, CD22, CD34, CD123, FLT-3, or ROR1.

[0571] Exemplary sequences of various scFv fragments and other CAR components are provided herein. It is noted that these CAR components (e.g., of SEQ ID NO: 121, or a sequence of Table 2, 3, 6, 11A, 11B, 16, or 25) without a leader sequence (e.g., without the amino acid sequence of SEQ ID NO: 13 or a nucleotide sequence of SEQ ID NO: 54), are also provided herein.

[0572] In embodiments, the CAR sequences described herein contain a Q/K residue change in the signal domain of the co-stimulatory domain derived from CD3zeta chain.

[0573] In one aspect, the present invention encompasses a recombinant nucleic acid construct comprising a nucleic acid molecule encoding a CAR, wherein the nucleic acid molecule comprises the nucleic acid sequence encoding an anti-CD19 binding domain, e.g., described herein, that is contiguous with and in the same reading frame as a nucleic acid sequence encoding an intracellular signaling domain. In one aspect, the anti-CD19 binding domain is selected from one or more of SEQ ID NOS:1-12 and 58. In one aspect, the anti-CD19 binding domain is encoded by a nucleotide residues 64 to 813 of the sequence provided in one or more of SEQ ID NOS:61-72 and 97. In one aspect, the anti-CD19 binding domain is encoded by a nucleotide residues 64 to 813 of SEQ ID NO:61. In one aspect, the anti-CD19 binding domain is encoded by a nucleotide residues 64 to 813 of SEQ ID NO:62. In one aspect, the anti-CD19 binding domain is encoded by a nucleotide residues 64 to 813 of SEQ ID NO:63. In one aspect, the anti-CD19 binding domain is encoded by a nucleotide residues 64 to 813 of SEQ ID NO:64. In one aspect, the anti-CD19 binding domain is encoded by a nucleotide residues 64 to 813 of SEQ ID NO:65. In one aspect, the anti-CD19 binding domain is encoded by a nucleotide residues 64 to 813 of SEQ ID NO:66. In one aspect, the anti-CD19 binding domain is encoded by a nucleotide residues 64 to 813 of SEQ ID NO:67. In one aspect, the anti-CD19 binding domain is encoded by a nucleotide residues 64 to 813 of SEQ ID NO:68. In one aspect, the anti-CD19 binding domain is encoded by a nucleotide residues 64 to 813 of SEQ ID NO:69. In one aspect, the anti-CD19 binding domain is encoded by a nucleotide residues 64 to 813 of SEQ ID NO:70. In one aspect, the anti-CD19 binding domain is encoded by a nucleotide residues 64 to 813 of SEQ ID NO:71. In one aspect, the anti-CD19 binding domain is encoded by a nucleotide residues 64 to 813 of SEQ ID NO:72.

TABLE 2
Humanized CD19 CAR Constructs

| | | |
|---|---|---|
| Name | SEQ ID | Sequence |

CAR 1

| | | |
|---|---|---|
| CAR1 scFv | 1 | EIVMTQSPATLSLSPGERATLSCRASQDISKYLNWYQQKPGQAPRLLIYHT |
| domain | | SRLHSGIPARFSGSGSGTDYTLTISSLQPEDFAVYFCQQGNTLPYTFGQGT |
| | | KLEIKGGGGSGGGGSGGGGSQVQLQESGPGLVKPSETLSLTCTVSGVSLPD |
| | | YGVSWIRQPPGKGLEWIGVIWGSETTYYSSSLKSRVTISKDNSKNQVSLKL |
| | | SSVTAADTAVYYCAKHYYYGGSYAMDYWGQGTLVTVSS |
| 103101 | 61 | atggccctccctgtcaccgccctgctgcttccgctggctcttctgctccacgccgc |
| CAR1 | | tcggcccgaaattgtgatgacccagtcacccgccactcttagcctttcacccggtg |
| Soluble | | agcgcgcaaccctgtcttgcagagcctcccaagacatctcaaaataccttaattgg |
| scFv - nt | | tatcaacagaagcccggacaggctcctcgccttctgatctaccacaccagccggct |
| | | ccattctggaatccctgccaggttcagcggtagcggatctgggaccgactacaccc |
| | | tcactatcagctcactgcagccagaggacttcgctgtctatttctgtcagcaaggg |
| | | aacaccctgccctacacctttggacagggcaccaagctcgagattaaaggtggagg |
| | | tggcagcggaggaggtgggtccggcggtggaggaagccaggtccaactccaagaaa |
| | | gcggaccgggtcttgtgaagccatcagaaactctttcactgacttgtactgtgagc |
| | | ggagtgtctctccccgattacggggtgtcttggatcagacagccaccggggaaggg |
| | | tctggaatggattggagtgatttggggctctgagactacttactactcttcatccc |
| | | tcaagtcacgcgtcaccatctcaaaggacaactctaagaatcaggtgtcactgaaa |
| | | ctgtcatctgtgaccgcagccgacaccgccgtgtactattgcgctaagcattacta |
| | | ttatggcgggagctacgcaatggattactggggacagggtactctggtcaccgtgt |
| | | ccagccaccaccatcatcaccatcaccat |
| 103101 | 73 | MALPVTALLLPLALLLHAARPeivmtqspatlslspgeratlscrasqdiskylnw |
| CAR1 | | yqqkpgqaprlliyhtsrlhsgiparfsgsgsgtdytltisslqpedfavyfcqqg |
| Soluble | | ntlpytfgqgtkleikggggsggggsggggsqvqlqesgpglvkpsetlsltctvs |
| scFv - aa | | gvslpdygvswirqppgkglewigviwgsettyyssslksrvtiskdnsknqvslk |
| | | lssvtaadtavyycakhyyyggsyamdywgqgtlvtvsshhhhhhhh |
| 104875 | 85 | atggccctccctgtcaccgccctgctgcttccgctggctcttctgctccacgccgc |
| CAR 1 | | tcggcccgaaattgtgatgacccagtcacccgccactcttagcctttcacccggtg |
| Full - nt | | agcgcgcaaccctgtcttgcagagcctcccaagacatctcaaaataccttaattgg |
| | | tatcaacagaagcccggacaggctcctcgccttctgatctaccacaccagccggct |
| | | ccattctggaatccctgccaggttcagcggtagcggatctgggaccgactacaccc |
| | | tcactatcagctcactgcagccagaggacttcgctgtctatttctgtcagcaaggg |
| | | aacaccctgccctacacctttggacagggcaccaagctcgagattaaaggtggagg |
| | | tggcagcggaggaggtgggtccggcggtggaggaagccaggtccaactccaagaaa |
| | | gcggaccgggtcttgtgaagccatcagaaactctttcactgacttgtactgtgagc |
| | | ggagtgtctctccccgattacggggtgtcttggatcagacagccaccggggaaggg |
| | | tctggaatggattggagtgatttggggctctgagactacttactactcttcatccc |
| | | tcaagtcacgcgtcaccatctcaaaggacaactctaagaatcaggtgtcactgaaa |
| | | ctgtcatctgtgaccgcagccgacaccgccgtgtactattgcgctaagcattacta |
| | | ttatggcgggagctacgcaatggattactggggacagggtactctggtcaccgtgt |
| | | ccagcaccactaccccagcaccgaggccacccaccccggctcctaccatcgcctcc |
| | | cagcctctgtccctgcgtccggaggcatgtagacccgcagctggtggggccgtgca |
| | | tacccggggtcttgacttcgcctgcgatatctacatttgggcccctctggctggta |
| | | cttgcggggtcctgctgctttcactcgtgatcactctttactgtaagcgcggtcgg |
| | | aagaagctgctgtacatctttaagcaacccttcatgaggcctgtgcagactactca |
| | | agaggaggacggctgttcatgccggttcccagaggaggaggaaggcggctgcgaac |
| | | tgcgcgtgaaattcagccgcagcgcagatgctccagcctacaagcaggggcagaac |
| | | cagctctacaacgaactcaatcttggtcggagagaggagtacgacgtgctggacaa |
| | | gcggagaggacgggacccagaaatgggcgggaagccgcgcagaaagaatccccaag |
| | | agggcctgtacaacgagctccaaaaggataagatggcagaagcctatagcgagatt |
| | | ggtatgaaaggggaacgcagaagaggcaaaggccacgacggactgtaccagggact |
| | | cagcaccgccaccaaggacacctatgacgctcttcacatgcaggccctgccgcctc |
| | | gg |
| 104875 | 31 | MALPVTALLLPLALLLHAARPeivmtqspatlslspgeratlscrasqdiskylnw |
| CAR 1 | | yqqkpgqaprlliyhtsrlhsgiparfsgsgsgtdytltisslqpedfavyfcqqg |
| Full - aa | | ntlpytfgqgtkleikggggsggggsggggsqvqlqesgpglvkpsetlsltctvs |
| | | gvslpdygvswirqppgkglewigviwgsettyyssslksrvtiskdnsknqvslk |
| | | lssvtaadtavyycakhyyyggsyamdywgqgtlvtvsstttpaprpptpaptias |
| | | qplslrpeacrpaaggavhtrgldfacdiyiwaplagtcgvlllslvitlyckrgr |
| | | kkllyifkqpfmrpvqttgeedgcscrfpeeeeggcelrvkfsrsadapaykqgqn |
| | | qlynelnlgrreeydvldkrrgrdpemggkprrknpqeglynelqkdkmaeaysei |
| | | gmkgerrrgkghdglyqglstatkdtydalhmqalppr |

CAR2

| | | |
|---|---|---|
| CAR2 scFv | 2 | eivmtqspatlslspgeratlscrasqdiskylnwyqqkpgqaprlliyhtsrlhs |
| domain | | giparfsgsgsgtdytltisslqpedfavyfcqqgntlpytfgqgtkleikggggs |
| | | ggggsggggsqvqlqesgpglvkpsetlsltctvsgvslpdygvswirqppgkgle |
| | | wigviwgsettyyqsslksrvtiskdnsknqvslklssvtaadtavyycakhyyyg |
| | | gsyamdywgqgtlvtvss |
| 103102 | 62 | atggccctccctgtcaccgccctgctgcttccgctggctcttctgctccacgccgc |
| CAR2 - | | tcggcccgaaattgtgatgacccagtcacccgccactcttagcctttcacccggtg |
| Soluble | | agcgcgcaaccctgtcttgcagagcctcccaagacatctcaaaataccttaattgg |
| scFv - nt | | tatcaacagaagcccggacaggctcctcgccttctgatctaccacaccagccggct |
| | | ccattctggaatccctgccaggttcagcggtagcggatctgggaccgactacaccc |
| | | tcactatcagctcactgcagccagaggacttcgctgtctatttctgtcagcaaggg |
| | | aacaccctgccctacacctttggacagggcaccaagctcgagattaaaggtggagg |
| | | tggcagcggaggaggtgggtccggcggtggaggaagccaggtccaactccaagaaa |
| | | gcggaccgggtcttgtgaagccatcagaaactctttcactgacttgtactgtgagc |
| | | ggagtgtctctccccgattacggggtgtcttggatcagacagccaccggggaaggg |
| | | tctggaatggattggagtgatttggggctctgagactacttactaccaatcatccc |
| | | tcaagtcacgcgtcaccatctcaaaggacaactctaagaatcaggtgtcactgaaa |
| | | ctgtcatctgtgaccgcagccgacaccgccgtgtactattgcgctaagcattacta |
| | | ttatggcgggagctacgcaatggattactggggacagggtactctggtcaccgtgt |
| | | ccagccaccaccatcatcaccatcaccat |
| 103102 | 74 | MALPVTALLLPLALLLHAARPeivmtqspatlslspgeratlscrasqdiskylnw |
| CAR2 - | | yqqkpgqaprlliyhtsrlhsgiparfsgsgsgtdytltisslqpedfavyfcqqg |
| Soluble | | ntlpytfgqgtkleikggggsggggsggggsqvqlqesgpglvkpsetlsltctvs |
| scFv - aa | | gvslpdygvswirqppgkglewigviwgsettyyqsslksrvtiskdnsknqvslk |
| | | lssvtaadtavyycakhyyyggsyamdywgqgtlvtvsshhhhhhhh |
| 104876 | 86 | atggccctccctgtcaccgccctgctgcttccgctggctcttctgctccacgccgc |
| CAR 2 - | | tcggcccgaaattgtgatgacccagtcacccgccactcttagcctttcacccggtg |
| Full - nt | | agcgcgcaaccctgtcttgcagagcctcccaagacatctcaaaataccttaattgg |
| (also | | tatcaacagaagcccggacaggctcctcgccttctgatctaccacaccagccggct |
| referred to | | ccattctggaatccctgccaggttcagcggtagcggatctgggaccgactacaccc |
| herein as | | tcactatcagctcactgcagccagaggacttcgctgtctatttctgtcagcaaggg |
| CTL119 | | aacaccctgccctacacctttggacagggcaccaagctcgagattaaaggtggagg |
| nucleotide | | tggcagcggaggaggtgggtccggcggtggaggaagccaggtccaactccaagaaa |
| sequence) | | gcggaccgggtcttgtgaagccatcagaaactctttcactgacttgtactgtgagc |
| | | ggagtgtctctccccgattacggggtgtcttggatcagacagccaccggggaaggg |
| | | tctggaatggattggagtgatttggggctctgagactacttactaccaatcatccc |
| | | tcaagtcacgcgtcaccatctcaaaggacaactctaagaatcaggtgtcactgaaa |
| | | ctgtcatctgtgaccgcagccgacaccgccgtgtactattgcgctaagcattacta |
| | | ttatggcgggagctacgcaatggattactggggacagggtactctggtcaccgtgt |
| | | ccagcaccactaccccagcaccgaggccacccaccccggctcctaccatcgcctcc |
| | | cagcctctgtccctgcgtccggaggcatgtagacccgcagctggtggggccgtgca |
| | | tacccggggtcttgacttcgcctgcgatatctacatttgggcccctctggctggta |
| | | cttgcggggtcctgctgctttcactcgtgatcactctttactgtaagcgcggtcgg |
| | | aagaagctgctgtacatctttaagcaacccttcatgaggcctgtgcagactactca |
| | | agaggaggacggctgttcatgccggttcccagaggaggaggaaggcggctgcgaac |
| | | tgcgcgtgaaattcagccgcagcgcagatgctccagcctacaagcaggggcagaac |
| | | cagctctacaacgaactcaatcttggtcggagagaggagtacgacgtgctggacaa |
| | | gcggagaggacgggacccagaaatgggcgggaagccgcgcagaaagaatccccaag |
| | | agggcctgtacaacgagctccaaaaggataagatggcagaagcctatagcgagatt |
| | | ggtatgaaaggggaacgcagaagaggcaaaggccacgacggactgtaccagggact |
| | | cagcaccgccaccaaggacacctatgacgctcttcacatgcaggccctgccgcctc |
| | | gg |
| 104876 | 32 | MALPVTALLLPLALLLHAARPeivmtqspatlslspgeratlscrasqdiskylnw |
| CAR 2 | - | yqqkpgqaprlliyhtsrlhsgiparfsgsgsgtdytltisslqpedfavyfcqqg |
| Full - aa | | ntlpytfgqgtkleikggggsggggsggggsqvqlqesgpglvkpsetlsltctvs |
| (also | | gvslpdygvswirqppgkglewigviwgsettyyqsslksrvtiskdnsknqvslk |
| referred to | | lssvtaadtavyycakhyyyggsyamdywgqgtlvtvsstttpaprpptpaptias |
| herein as | | qplslrpeacrpaaggavhtrgldfacdiyiwaplagtcgvlllslvitlyckrgr |
| CTL119 | | kkllyifkqpfmrpvqttqeedgcscrfpeeeeggcelrckfsrsadapaykqgqn |
| amino acid | | qlynelnlgrreeydvldkrrgrdpemggkprrknpqeglynelqkdkmaeaysei |
| sequence) | | gmkgerrrgkghdglyqqlstatkdtydalhmqalppr |

CAR 3

| | | |
|---|---|---|
| CAR3 scFv | 3 | qvqlqesgpglvkpsetlsltctvsgvslpdygvswirqppgkglewigviwgset |
| domain | | tyyssslksrvtiskdnsknqvslklssvtaadtavyycakhyyyggsyamdywgq |
| | | gtlvtvssggggsggggsggggseivmtqspatlslspgeratlscrasqdiskyl |
| | | nwyqqkpgqaprlliyhtsrlhsgiparfsgsgsgtdytltisslqpedfavyfcq |
| | | qgntlpytfgqgtkleik |
| 103104 | 63 | atggctctgcccgtgaccgcactcctcctgccactggctctgctgcttcacgccgc |
| CAR 3 - | | tcgcccacaagtccagcttcaagaatcagggcctggtctggtgaagccatctgaga |
| Soluble | | ctctgtccctcacttgcaccgtgagcggagtgtccctcccagactacggagtgagc |
| scFv - nt | | tggattagacagcctcccggaaagggactggagtggatcggagtgatttggggtag |
| | | cgaaaccacttactattcatcttccctgaagtcacgggtcaccatttcaaaggata |
| | | actcaaagaatcaagtgagcctcaagctctcatcagtcaccgccgctgacaccgcc |
| | | gtgtattactgtgccaagcattactactatggagggtcctacgccatggactactg |
| | | gggccagggaactctggtcactgtgtcatctggtggaggaggtagcggaggaggcg |
| | | ggagcggtggaggtggctccgaaatcgtgatgacccagagccctgcaaccctgtcc |
| | | ctttctcccggggaacgggctaccctttcttgtcgggcatcacaagatatctcaaa |
| | | atacctcaattggtatcaacagaagccgggacaggcccctaggcttcttatctacc |
| | | acacctctcgcctgcatagcgggattcccgcacgctttagcgggtctggaagcggg |
| | | accgactacactctgaccatctcatctctccagcccgaggacttcgccgtctactt |
| | | ctgccagcagggtaacaccctgccgtacaccttcggccagggcaccaagcttgaga |
| | | tcaaacatcaccaccatcatcaccatcac |
| 103104 | 75 | MALPVTALLLPLALLLHAARPqvqlqesgpglvkpsetlsltctvsgvslpdygvs |
| CAR 3 - | | wirqppgkglewigviwgsettyyssslksrvtiskdnsknqvslklssvtaadta |
| Soluble | | vyycakhyyyggsyamdywgqgtlvtvssggggsggggsggggseivmtqspatls |
| scFv - aa | | lspgeratlscrasqdiskylnwyqqkpgqaprlliyhtsrlhsgiparfsgsgsg |
| | | tdytltisslqpedfavyfcqqgntlpytfgqgtkleikhhhhhhhh |
| 104877 | 87 | atggctctgcccgtgaccgcactcctcctgccactggctctgctgcttcacgccgc |
| CAR 3 - | | tcgcccacaagtccagcttcaagaatcagggcctggtctggtgaagccatctgaga |
| Full - nt | | ctctgtccctcacttgcaccgtgagcggagtgtccctcccagactacggagtgagc |
| | | tggattagacagcctcccggaaagggactggagtggatcggagtgatttggggtag |
| | | cgaaaccacttactattcatcttccctgaagtcacgggtcaccatttcaaaggata |
| | | actcaaagaatcaagtgagcctcaagctctcatcagtcaccgccgctgacaccgcc |
| | | gtgtattactgtgccaagcattactactatggagggtcctacgccatggactactg |
| | | gggccagggaactctggtcactgtgtcatctggtggaggaggtagcggaggaggcg |
| | | ggagcggtggaggtggctccgaaatcgtgatgacccagagccctgcaaccctgtcc |
| | | ctttctcccggggaacgggctaccctttcttgtcgggcatcacaagatatctcaaa |
| | | atacctcaattggtatcaacagaagccgggacaggcccctaggcttcttatctacc |
| | | acacctctcgcctgcatagcgggattcccgcacgctttagcgggtctggaagcggg |
| | | accgactacactctgaccatctcatctctccagcccgaggacttcgccgtctactt |
| | | ctgccagcagggtaacaccctgccgtacaccttcggccagggcaccaagcttgaga |
| | | tcaaaaccactactcccgctccaaggccacccacccctgccccgaccatcgcctct |
| | | cagccgctttccctgcgtccggaggcatgtagacccgcagctggtggggccgtgca |
| | | tacccggggtcttgacttcgcctgcgatatctacatttgggcccctctggctggta |
| | | cttgcggggtcctgctgctttcactcgtgatcactctttactgtaagcgcggtcgg |
| | | aagaagctgctgtacatctttaagcaacccttcatgaggcctgtgcagactactca |
| | | agaggaggacggctgttcatgccggttcccagaggaggaggaaggcggctgcgaac |
| | | tgcgcgtgaaattcagccgcagcgcagatgctccagcctacaagcaggggcagaac |
| | | cagctctacaacgaactcaatcttggtcggagagaggagtacgacgtgctggacaa |
| | | gcggagaggacgggacccagaaatgggcgggaagccgcgcagaaagaatccccaag |
| | | agggcctgtacaacgagctccaaaaggataagatggcagaagcctatagcgagatt |
| | | ggtatgaaaggggaacgcagaagaggcaaaggccacgacggactgtaccagggact |
| | | cagcaccgccaccaaggacacctatgacgctcttcacatgcaggccctgccgcctc |
| | | gg |
| 104877 | 33 | MALPVTALLLPLALLLHAARPqvqlqesgpglvkpsetlsltctvsgvslpdygvs |
| CAR 3 - | | wirqppgkglewigviwgsettyyssslksrvtiskdnsknqvslklssvtaadta |
| Full - aa | | vyycakhyyyggsyamdywgqgtlvtvssggggsggggsggggseivmtqspatls |
| | | lspgeratlscrasqdiskylnwyqqkpgqaprlliyhtsrlhsgiparfsgsgsg |
| | | tdytltisslqpedfavyfcqqgntlpytfgqgtkleiktttpaprpptpaptias |
| | | qplslrpeacrpaaggavhtrgldfacdiyiwaplagtcgvlllslvitlyckrgr |
| | | kkllyifkqpfmrpvqttqeedgcscrfpeeeeggcelrvkfsrsadapaykqgqn |
| | | qlynelnlgrreeydvldkrrgrdpemggkprrknpqeglynelqkdkmaeaysei |
| | | gmkgerrrgkghdglyqglstatkdtydalhmqalppr |

CAR 4

| | | |
|---|---|---|
| CAR4 scFv | 4 | qvqlqesgpglvkpsetlsltctvsgvslpdygvswirqppgkglewigviwgset |
| domain | | tyyqsslksrvtiskdnsknqvslklssvtaadtavyycakhyyyggsyamdywgq |
| | | gtlvtvssggggsggggsggggseivmtqspatlslspgeratlscrasqdiskyl |
| | | nwyqqkpgqaprlliyhtsrlhsgiparfsgsgsgtdytltisslqpedfavyfcq |
| | | qgntlpytfgqgtkleik |
| 103106 | 64 | atggctctgcccgtgaccgcactcctcctgccactggctctgctgcttcacgccgc |
| CAR4 - | | tcgcccacaagtccagcttcaagaatcagggcctggtctggtgaagccatctgaga |
| Soluble | | ctctgtccctcacttgcaccgtgagcggagtgtccctcccagactacggagtgagc |
| scFv - nt | | tggattagacagcctcccggaaagggactggagtggatcggagtgatttggggtag |
| | | cgaaaccacttactatcaatcttccctgaagtcacgggtcaccatttcaaaggata |
| | | actcaaagaatcaagtgagcctcaagctctcatcagtcaccgccgctgacaccgcc |
| | | gtgtattactgtgccaagcattactactatggagggtcctacgccatggactactg |
| | | gggccagggaactctggtcactgtgtcatctggtggaggaggtagcggaggaggcg |
| | | ggagcggtggaggtggctccgaaatcgtgatgacccagagccctgcaaccctgtcc |
| | | ctttctcccggggaacgggctaccctttcttgtcgggcatcacaagatatctcaaa |
| | | atacctcaattggtatcaacagaagccgggacaggcccctaggcttcttatctacc |
| | | acacctctcgcctgcatagcgggattcccgcacgctttagcgggtctggaagcggg |
| | | accgactacactctgaccatctcatctctccagcccgaggacttcgccgtctactt |
| | | ctgccagcagggtaacaccctgccgtacaccttcggccagggcaccaagcttgaga |
| | | tcaaacatcaccaccatcatcaccatcac |
| 103106 | 76 | MALPVTALLLPLALLLHAARPqvqlqesgpglvkpsetlsltctvsgvslpdygvs |
| CAR4 - | | wirqppgkglewigviwgsettyyqsslksrvtiskdnsknqvslklssvtaadta |
| Soluble | | vyycakhyyyggsyamdywgqgtlvtvssggggsggggsggggseivmtqspatls |
| scFv -aa | | lspgeratlscrasqdiskylnwyqqkpgqaprlliyhtsrlhsgiparfsgsgsg |
| | | tdytltisslqpedfavyfcqqgntlpytfgqgtkleikhhhhhhhh |
| 104878 | 88 | atggctctgcccgtgaccgcactcctcctgccactggctctgctgcttcacgccgc |
| CAR 4 - | | tcgcccacaagtccagcttcaagaatcagggcctggtctggtgaagccatctgaga |
| Full - nt | | ctctgtccctcacttgcaccgtgagcggagtgtccctcccagactacggagtgagc |
| | | tggattagacagcctcccggaaagggactggagtggatcggagtgatttggggtag |
| | | cgaaaccacttactatcaatcttccctgaagtcacgggtcaccatttcaaaggata |
| | | actcaaagaatcaagtgagcctcaagctctcatcagtcaccgccgctgacaccgcc |
| | | gtgtattactgtgccaagcattactactatggagggtcctacgccatggactactg |
| | | gggccagggaactctggtcactgtgtcatctggtggaggaggtagcggaggaggcg |
| | | ggagcggtggaggtggctccgaaatcgtgatgacccagagccctgcaaccctgtcc |
| | | ctttctcccggggaacgggctaccctttcttgtcgggcatcacaagatatctcaaa |
| | | atacctcaattggtatcaacagaagccgggacaggcccctaggcttcttatctacc |
| | | acacctctcgcctgcatagcgggattcccgcacgctttagcgggtctggaagcggg |
| | | accgactacactctgaccatctcatctctccagcccgaggacttcgccgtctactt |
| | | ctgccagcagggtaacaccctgccgtacaccttcggccagggcaccaagcttgaga |
| | | tcaaaaccactactcccgctccaaggccacccacccctgccccgaccatcgcctct |
| | | cagccgctttccctgcgtccggaggcatgtagacccgcagctggtggggccgtgca |
| | | tacccggggtcttgacttcgcctgcgatatctacatttgggcccctctggctggta |
| | | cttgcggggtcctgctgctttcactcgtgatcactctttactgtaagcgcggtcgg |
| | | aagaagctgctgtacatctttaagcaacccttcatgaggcctgtgcagactactca |
| | | agaggaggacggctgttcatgccggttcccagaggaggaggaaggcggctgcgaac |
| | | tgcgcgtgaaattcagccgcagcgcagatgctccagcctacaagcaggggcagaac |
| | | cagctctacaacgaactcaatcttggtcggagagaggagtacgacgtgctggacaa |
| | | gcggagaggacgggacccagaaatgggcgggaagccgcgcagaaagaatccccaag |
| | | agggcctgtacaacgagctccaaaaggataagatggcagaagcctatagcgagatt |
| | | ggtatgaaaggggaacgcagaagaggcaaaggccacgacggactgtaccagggact |
| | | cagcaccgccaccaaggacacctatgacgctcttcacatgcaggccctgccgcctc |
| | | gg |
| 104878 | 34 | MALPVTALLLPLALLLHAARPqvqlqesgpglvkpsetlsltctvsgvslpdygvs |
| CAR 4 - | | wirqppgkglewigviwgsettyyqsslksrvtiskdnsknqvslklssvtaadta |
| Full - aa | | vyycakhyyyggsyamdywgqgtlvtvssggggsggggsggggseivmtqspatls |
| | | lspgeratlscrasqdiskylnwyqqkpgqaprlliyhtsrlhsgiparfsgsgsg |
| | | tdytltisslqpedfavyfcqqgntlpytfgqgtkleiktttpaprpptpaptias |
| | | qplslrpeacrpaaggavhtrgldfacdiyiwaplagtcgvlllslvitlyckrgr |
| | | kkllyifkqpfmrpvqttgeedgcscrfpeeeeggcelrvkfsrsadapaykqgqn |
| | | qlynelnlgrreeydvldkrrgrdpemggkprrknpqeglynelqkdkmaeaysei |
| | | gmkgerrrgkghdglyqglstatkdtydalhmqalppr |

CAR 5

| | | |
|---|---|---|
| CAR5 scFv | 5 | eivmtqspatlslspgeratlscrasqdiskylnwyqqkpgqaprlliyhtsrlhs |
| domain | | giparfsgsgsgtdytltisslqpedfavyfcqqgntlpytfgqgtkleikggggs |
| | | ggggsggggsggggsqvqlqesgpglvkpsetlsltctvsgvslpdygvswirqpp |
| | | gkglewigviwgsettyyssslksrvtiskdnsknqvslklssvtaadtavyycak |
| | | hyyyggsyamdywgqgtlvtvss |
| 99789 | 65 | atggccctcccagtgaccgctctgctgctgcctctcgcacttcttctccatgccgc |
| CAR5 - | | tcggcctgagatcgtcatgacccaaagccccgctaccctgtccctgtcacccggcg |
| Soluble | | agagggcaaccctttcatgcagggccagccaggacatttctaagtacctcaactgg |
| scFv - nt | | tatcagcagaagccagggcaggctcctcgcctgctgatctaccacaccagccgcct |
| | | ccacagcggtatccccgccagattttccgggagcgggtctggaaccgactacaccc |
| | | tcaccatctcttctctgcagcccgaggatttcgccgtctatttctgccagcagggg |
| | | aatactctgccgtacaccttcggtcaaggtaccaagctggaaatcaagggaggcgg |
| | | aggatcaggcggtggcggaagcggaggaggtggctccggaggaggaggttcccaag |
| | | tgcagcttcaagaatcaggacccggacttgtgaagccatcagaaaccctctccctg |
| | | acttgtaccgtgtccggtgtgagcctccccgactacggagtctcttggattcgcca |
| | | gcctccggggaagggtcttgaatggattggggtgatttggggatcagagactactt |
| | | actactcttcatcacttaagtcacgggtcaccatcagcaaagataatagcaagaac |
| | | caagtgtcacttaagctgtcatctgtgaccgccgctgacaccgccgtgtactattg |
| | | tgccaaacattactattacggagggtcttatgctatggactactggggacagggga |
| | | ccctggtgactgtctctagccatcaccatcaccaccatcatcac |
| 99789 | 77 | MALPVTALLLPLALLLHAARPeivmtqspatlslspgeratlscrasqdiskylnw |
| CAR5 - | | yqqkpgqaprlliyhtsrlhsgiparfsgsgsgtdytltisslqpedfavyfcqqg |
| Soluble | | ntlpytfgqgtkleikggggsggggsggggsggggsqvqlqesgpglvkpsetlsl |
| scFv -aa | | tctvsgvslpdygvswirqppgkglewigviwgsettyyssslksrvtiskdnskn |
| | | qvslklssvtaadtavyycakhyyyggsyamdywgqgtlvtvsshhhhhhhh |
| 104879 | 89 | atggccctccctgtcaccgccctgctgcttccgctggctcttctgctccacgccgc |
| CAR5 - | | tcggcccgaaattgtgatgacccagtcacccgccactcttagcctttcacccggtg |
| Full - nt | | agcgcgcaaccctgtcttgcagagcctcccaagacatctcaaaataccttaattgg |
| | | tatcaacagaagcccggacaggctcctcgccttctgatctaccacaccagccggct |
| | | ccattctggaatccctgccaggttcagcggtagcggatctgggaccgactacaccc |
| | | tcactatcagctcactgcagccagaggacttcgctgtctatttctgtcagcaaggg |
| | | aacaccctgccctacacctttggacagggcaccaagctcgagattaaaggtggagg |
| | | tggcagcggaggaggtgggtccggcggtggaggaagcggcggaggcgggagccagg |
| | | tccaactccaagaaagcggaccgggtcttgtgaagccatcagaaactctttcactg |
| | | acttgtactgtgagcggagtgtctctccccgattacggggtgtcttggatcagaca |
| | | gccaccggggaagggtctggaatggattggagtgatttggggctctgagactactt |
| | | actactcttcatccctcaagtcacgcgtcaccatctcaaaggacaactctaagaat |
| | | caggtgtcactgaaactgtcatctgtgaccgcagccgacaccgccgtgtactattg |
| | | cgctaagcattactattatggcgggagctacgcaatggattactggggacagggta |
| | | ctctggtcaccgtgtccagcaccactaccccagcaccgaggccacccaccccggct |
| | | cctaccatcgcctcccagcctctgtccctgcgtccggaggcatgtagacccgcagc |
| | | tggtggggccgtgcatacccggggtcttgacttcgcctgcgatatctacatttggg |
| | | cccctctggctggtacttgcggggtcctgctgctttcactcgtgatcactctttac |
| | | tgtaagcgcggtcggaagaagctgctgtacatctttaagcaacccttcatgaggcc |
| | | tgtgcagactactcaagaggaggacggctgttcatgccggttcccagaggaggagg |
| | | aaggcggctgcgaactgcgcgtgaaattcagccgcagcgcagatgctccagcctac |
| | | aagcaggggcagaaccagctctacaacgaactcaatcttggtcggagagaggagta |
| | | cgacgtgctggacaagcggagaggacgggacccagaaatgggcgggaagccgcgca |
| | | gaaagaatccccaagagggcctgtacaacgagctccaaaaggataagatggcagaa |
| | | gcctatagcgagattggtatgaaaggggaacgcagaagaggcaaaggccacgacgg |
| | | actgtaccagggactcagcaccgccaccaaggacacctatgacgctcttcacatgc |
| | | aggccctgccgcctcgg |
| 104879 | 35 | MALPVTALLLPLALLLHAARPeivmtqspatlslspgeratlscrasgdiskylnw |
| CAR 5 - | | yqqkpgqaprlliyhtsrlhsgiparfsgsgsgtdytltisslqpedfavyfcqqg |
| Full - aa | | ntlpytfgqgtkleikggggsggggsggggsggggsqvqlqesgpglvkpsetlsl |
| | | tctvsgvslpdygvswirqppgkglewigviwgsettyyssslksrvtiskdnskn |
| | | qvslklssvtaadtavyycakhyyyggsyamdywgqgtlvtvsstttpaprpptpa |
| | | ptiasqplslrpeacrpaaggavhtrgldfacdiyiwaplagtcgvlllslvitly |
| | | ckrgrkkllyifkqpfmrpvqttqeedgcscrfpeeeeggcelrvkfsrsadapay |
| | | kqgqnqlynelnlgrreeydvldkrrgrdpemggkprrknpqeglynelqkdkmae |
| | | ayseigmkgerrrgkghdglyqglstatkdtydalhmqalppr |

CAR 6

| | | |
|---|---|---|
| CAR6 | 6 | eivmtqspatlslspgeratlscrasqdiskylnwyqqkpgqaprlliyhtsrlhs |
| scFv | | giparfsgsgsgtdytltisslqpedfavyfcqqgntlpytfgqgtkleikggggs |
| domain | | ggggsggggsggggsqvqlqesgpglvkpsetlsltctvsgvslpdygvswirqpp |
| | | gkglewigviwgsettyyqsslksrvtiskdnsknqvslklssvtaadtavyycak |
| | | hyyyggsyamdywgqgtlvtvss |
| 99790 | 66 | atggccctcccagtgaccgctctgctgctgcctctcgcacttcttctccatgccgc |
| CAR6 - | | tcggcctgagatcgtcatgacccaaagccccgctaccctgtccctgtcacccggcg |
| Soluble | | agagggcaaccctttcatgcagggccagccaggacatttctaagtacctcaactgg |
| scFv - nt | | tatcagcagaagccagggcaggctcctcgcctgctgatctaccacaccagccgcct |
| | | ccacagcggtatccccgccagattttccgggagcgggtctggaaccgactacaccc |
| | | tcaccatctcttctctgcagcccgaggatttcgccgtctatttctgccagcagggg |
| | | aatactctgccgtacaccttcggtcaaggtaccaagctggaaatcaagggaggcgg |
| | | aggatcaggcggtggcggaagcggaggaggtggctccggaggaggaggttcccaag |
| | | tgcagcttcaagaatcaggacccggacttgtgaagccatcagaaaccctctccctg |
| | | acttgtaccgtgtccggtgtgagcctccccgactacggagtctcttggattcgcca |
| | | gcctccggggaagggtcttgaatggattggggtgatttggggatcagagactactt |
| | | actaccagtcatcacttaagtcacgggtcaccatcagcaaagataatagcaagaac |
| | | caagtgtcacttaagctgtcatctgtgaccgccgctgacaccgccgtgtactattg |
| | | tgccaaacattactattacggagggtcttatgctatggactactggggacagggga |
| | | ccctggtgactgtctctagccatcaccatcaccaccatcatcac |
| 99790 | 78 | MALPVTALLLPLALLLHAARPeivmtqspatlslspgeratlscrasqdiskylnw |
| CAR6 - | | yqqkpgqaprlliyhtsrlhsgiparfsgsgsgtdytltisslqpedfavyfcqqg |
| Soluble | | ntlpytfgqgtkleikggggsggggsggggsggggsqvqlqesgpglvkpsetlsl |
| scFv - aa | | tctvsgvslpdygvswirqppgkglewigviwgsettyyqsslksrvtiskdnskn |
| | | qvslklssvtaadtavyycakhyyyggsyamdywgqgtlvtvsshhhhhhhh |
| 104880 | 90 | atggccctccctgtcaccgccctgctgcttccgctggctcttctgctccacgccgc |
| CAR6 - | | tcggcccgaaattgtgatgacccagtcacccgccactcttagcctttcacccggtg |
| Full - nt | | agcgcgcaaccctgtcttgcagagcctcccaagacatctcaaaataccttaattgg |
| | | tatcaacagaagcccggacaggctcctcgccttctgatctaccacaccagccggct |
| | | ccattctggaatccctgccaggttcagcggtagcggatctgggaccgactacaccc |
| | | tcactatcagctcactgcagccagaggacttcgctgtctatttctgtcagcaaggg |
| | | aacaccctgccctacacctttggacagggcaccaagctcgagattaaaggtggagg |
| | | tggcagcggaggaggtgggtccggcggtggaggaagcggaggcggagggagccagg |
| | | tccaactccaagaaagcggaccgggtcttgtgaagccatcagaaactctttcactg |
| | | acttgtactgtgagcggagtgtctctccccgattacggggtgtcttggatcagaca |
| | | gccaccggggaagggtctggaatggattggagtgatttggggctctgagactactt |
| | | actaccaatcatccctcaagtcacgcgtcaccatctcaaaggacaactctaagaat |
| | | caggtgtcactgaaactgtcatctgtgaccgcagccgacaccgccgtgtactattg |
| | | cgctaagcattactattatggcgggagctacgcaatggattactggggacagggta |
| | | ctctggtcaccgtgtccagcaccactaccccagcaccgaggccacccaccccggct |
| | | cctaccatcgcctcccagcctctgtccctgcgtccggaggcatgtagacccgcagc |
| | | tggtggggccgtgcatacccggggtcttgacttcgcctgcgatatctacatttggg |
| | | cccctctggctggtacttgcggggtcctgctgctttcactcgtgatcactctttac |
| | | tgtaagcgcggtcggaagaagctgctgtacatctttaagcaacccttcatgaggcc |
| | | tgtgcagactactcaagaggaggacggctgttcatgccggttcccagaggaggagg |
| | | aaggcggctgcgaactgcgcgtgaaattcagccgcagcgcagatgctccagcctac |
| | | aagcaggggcagaaccagctctacaacgaactcaatcttggtcggagagaggagta |
| | | cgacgtgctggacaagcggagaggacgggacccagaaatgggcgggaagccgcgca |
| | | gaaagaatccccaagagggcctgtacaacgagctccaaaaggataagatggcagaa |
| | | gcctatagcgagattggtatgaaaggggaacgcagaagaggcaaaggccacgacgg |
| | | actgtaccagggactcagcaccgccaccaaggacacctatgacgctcttcacatgc |
| | | aggccctgccgcctcgg |
| 104880 | 36 | MALPVTALLLPLALLLHAARPeivmtqspatlslspgeratlscrasqdiskylnw |
| CAR6 - | | yqqkpgqaprlliyhtsrlhsgiparfsgsgsgtdytltisslqpedfavyfcqqg |
| Full - aa | | ntlpytfgqgtkleikggggsggggsggggsggggsqvqlqesgpglvkpsetlsl |
| | | tctvsgvslpdygvswirqppgkglewigviwgsettyygsslksrvtiskdnskn |
| | | qvslklssvtaadtavyycakhyyyggsyamdywgqgtlvtvsstttpaprpptpa |
| | | ptiasqplslrpeacrpaaggavhtrgldfacdiyiwaplagtcgvlllslvitly |
| | | ckrgrkkllyifkqpfmrpvqttqeedgcscrfpeeeeggcelrvkfsrsadapay |
| | | kqgqnqlynelnlgrreeydvldkrrgrdpemggkprrknpqeglynelqkdkmae |
| | | ayseigmkgerrrgkghdglyqglstatkdtydalhmqalppr |

CAR7

| | | |
|---|---|---|
| CAR7 scFv | 7 | qvqlqesgpglvkpsetlsltctvsgvslpdygvswirqppgkglewigviwgset |
| domain | | tyyssslksrvtiskdnsknqvslklssvtaadtavyycakhyyyggsyamdywgq |
| | | gtlvtvssggggsggggsggggsggggseivmtqspatlslspgeratlscrasqd |
| | | iskylnwyqqkpgqaprlliyhtsrlhsgiparfsgsgsgtdytltisslqpedfa |
| | | vyfcqqgntlpytfgqgtkleik |
| 100796 | 67 | atggcactgcctgtcactgccctcctgctgcctctggccctccttctgcatgccgc |
| CAR7 - | | caggccccaagtccagctgcaagagtcaggacccggactggtgaagccgtctgaga |
| Soluble | | ctctctcactgacttgtaccgtcagcggcgtgtccctccccgactacggagtgtca |
| scFv - nt | | tggatccgccaacctcccgggaaagggcttgaatggattggtgtcatctggggttc |
| | | tgaaaccacctactactcatcttccctgaagtccagggtgaccatcagcaaggata |
| | | attccaagaaccaggtcagccttaagctgtcatctgtgaccgctgctgacaccgcc |
| | | gtgtattactgcgccaagcactactattacggaggaagctacgctatggactattg |
| | | gggacagggcactctcgtgactgtgagcagcggcggtggagggtctggaggtggag |
| | | gatccggtggtggtgggtcaggcggaggagggagcgagattgtgatgactcagtca |
| | | ccagccaccctttctctttcacccggcgagagagcaaccctgagctgtagagccag |
| | | ccaggacatttctaagtacctcaactggtatcagcaaaaaccggggcaggcccctc |
| | | gcctcctgatctaccatacctcacgccttcactctggtatccccgctcggtttagc |
| | | ggatcaggatctggtaccgactacactctgaccatttccagcctgcagccagaaga |
| | | tttcgcagtgtatttctgccagcagggcaatacccttccttacaccttcggtcagg |
| | | gaaccaagctcgaaatcaagcaccatcaccatcatcaccaccat |
| 100796 | 79 | MALPVTALLLPLALLLHAARPqvqlqesgpglvkpsetlsltctvsgvslpdygvs |
| CAR7 - | | wirqppgkglewigviwgsettyyssslksrvtiskdnsknqvslklssvtaadta |
| Soluble | | vyycakhyyyggsyamdywgqgtlvtvssggggsggggsggggsggggseivmtqs |
| scFv - aa | | patlslspgeratlscrasqdiskylnwyqqkpgqaprlliyhtsrlhsgiparfs |
| | | gsgsgtdytltisslqpedfavyfcqqgntlpytfgqgtkleikhhhhhhhh |
| 104881 | 91 | atggctctgcccgtgaccgcactcctcctgccactggctctgctgcttcacgccgc |
| CAR 7 | | tcgcccacaagtccagcttcaagaatcagggcctggtctggtgaagccatctgaga |
| Full - nt | | ctctgtccctcacttgcaccgtgagcggagtgtccctcccagactacggagtgagc |
| | | tggattagacagcctcccggaaagggactggagtggatcggagtgatttggggtag |
| | | cgaaaccacttactattcatcttccctgaagtcacgggtcaccatttcaaaggata |
| | | actcaaagaatcaagtgagcctcaagctctcatcagtcaccgccgctgacaccgcc |
| | | gtgtattactgtgccaagcattactactatggagggtcctacgccatggactactg |
| | | gggccagggaactctggtcactgtgtcatctggtggaggaggtagcggaggaggcg |
| | | ggagcggtggaggtggctccggaggtggcggaagcgaaatcgtgatgacccagagc |
| | | cctgcaaccctgtccctttctcccggggaacgggctaccctttcttgtcgggcatc |
| | | acaagatatctcaaaatacctcaattggtatcaacagaagccgggacaggccccta |
| | | ggcttcttatctaccacacctctcgcctgcatagcgggattcccgcacgctttagc |
| | | gggtctggaagcgggaccgactacactctgaccatctcatctctccagcccgagga |
| | | cttcgccgtctacttctgccagcagggtaacaccctgccgtacaccttcggccagg |
| | | gcaccaagcttgagatcaaaaccactactcccgctccaaggccacccacccctgcc |
| | | ccgaccatcgcctctcagccgctttccctgcgtccggaggcatgtagacccgcagc |
| | | tggtggggccgtgcatacccggggtcttgacttcgcctgcgatatctacatttggg |
| | | cccctctggctggtacttgcggggtcctgctgctttcactcgtgatcactctttac |
| | | tgtaagcgcggtcggaagaagctgctgtacatctttaagcaacccttcatgaggcc |
| | | tgtgcagactactcaagaggaggacggctgttcatgccggttcccagaggaggagg |
| | | aaggcggctgcgaactgcgcgtgaaattcagccgcagcgcagatgctccagcctac |
| | | aagcaggggcagaaccagctctacaacgaactcaatcttggtcggagagaggagta |
| | | cgacgtgctggacaagcggagaggacgggacccagaaatgggcgggaagccgcgca |
| | | gaaagaatccccaagagggcctgtacaacgagctccaaaaggataagatggcagaa |
| | | gcctatagcgagattggtatgaaaggggaacgcagaagaggcaaaggccacgacgg |
| | | actgtaccagggactcagcaccgccaccaaggacacctatgacgctcttcacatgc |
| | | aggccctgccgcctcgg |
| 104881 | 37 | MALPVTALLLPLALLLHAARPqvqlqesgpglvkpsetlsltctvsgvslpdygvs |
| CAR 7 | | wirqppgkglewigviwgsettyyssslksrvtiskdnsknqvslklssvtaadta |
| Full - aa | | vyycakhyyyggsyamdywgqgtlvtvssggggsggggsggggsggggseivmtqs |
| | | patlslspgeratlscrasgdiskylnwyqqkpgqaprlliyhtsrlhsgiparfs |
| | | gsgsgtdytltisslqpedfavyfcqqgntlpytfgqgtkleiktttpaprpptpa |
| | | ptiasqplslrpeacrpaaggavhtrgldfacdiyiwaplagtcgvlllslvitly |
| | | ckrgrkkllyifkqpfmrpvqttqeedgcscrfpeeeeggcelrvkfsrsadapay |
| | | kqgqnqlynelnlgrreeydvldkrrgrdpemggkprrknpqeglynelqkdkmae |
| | | ayseigmkgerrrgkghdglyqglstatkdtydalhmqalppr |

CAR8

| | | |
|---|---|---|
| CAR8 scFv | 8 | qvqlqesgpglvkpsetlsltctvsgvslpdygvswirqppgkglewigviwgset |
| domain | | tyyqsslksrvtiskdnsknqvslklssvtaadtavyycakhyyyggsyamdywgq |
| | | gtlvtvssggggsggggsggggsggggseivmtqspatlslspgeratlscrasqd |
| | | iskylnwyqqkpgqaprlliyhtsrlhsgiparfsgsgsgtdytltisslqpedfa |
| | | vyfcqqgntlpytfgqgtkleik |
| 100798 | 68 | atggcactgcctgtcactgccctcctgctgcctctggccctccttctgcatgccgc |
| CAR8 - | | caggccccaagtccagctgcaagagtcaggacccggactggtgaagccgtctgaga |
| Soluble | | ctctctcactgacttgtaccgtcagcggcgtgtccctccccgactacggagtgtca |
| scFv - nt | | tggatccgccaacctcccgggaaagggcttgaatggattggtgtcatctggggttc |
| | | tgaaaccacctactaccagtcttccctgaagtccagggtgaccatcagcaaggata |
| | | attccaagaaccaggtcagccttaagctgtcatctgtgaccgctgctgacaccgcc |
| | | gtgtattactgcgccaagcactactattacggaggaagctacgctatggactattg |
| | | gggacagggcactctcgtgactgtgagcagcggcggtggagggtctggaggtggag |
| | | gatccggtggtggtgggtcaggcggaggagggagcgagattgtgatgactcagtca |
| | | ccagccaccctttctctttcacccggcgagagagcaaccctgagctgtagagccag |
| | | ccaggacatttctaagtacctcaactggtatcagcaaaaaccggggcaggcccctc |
| | | gcctcctgatctaccatacctcacgccttcactctggtatccccgctcggtttagc |
| | | ggatcaggatctggtaccgactacactctgaccatttccagcctgcagccagaaga |
| | | tttcgcagtgtatttctgccagcagggcaatacccttccttacaccttcggtcagg |
| | | gaaccaagctcgaaatcaagcaccatcaccatcatcatcaccac |
| 100798 | 80 | MALPVTALLLPLALLLHAARPqvqlqesgpglvkpsetlsltctvsgvslpdygvs |
| CAR8 - | | wirqppgkglewigviwgsettyyqsslksrvtiskdnsknqvslklssvtaadta |
| Soluble | | vyycakhyyyggsyamdywgqgtlvtvssggggsggggsggggsggggseivmtqs |
| scFv - aa | | patlslspgeratlscrasqdiskylnwyqqkpgqaprlliyhtsrlhsgiparfs |
| | | gsgsgtdytltisslqpedfavyfcqqgntlpytfgqgtkleikhhhhhhhh |
| 104882 | 92 | atggctctgcccgtgaccgcactcctcctgccactggctctgctgcttcacgccgc |
| CAR 8 - | | tcgcccacaagtccagcttcaagaatcagggcctggtctggtgaagccatctgaga |
| Full - nt | | ctctgtccctcacttgcaccgtgagcggagtgtccctcccagactacggagtgagc |
| | | tggattagacagcctcccggaaagggactggagtggatcggagtgatttggggtag |
| | | cgaaaccacttactatcaatcttccctgaagtcacgggtcaccatttcaaaggata |
| | | actcaaagaatcaagtgagcctcaagctctcatcagtcaccgccgctgacaccgcc |
| | | gtgtattactgtgccaagcattactactatggagggtcctacgccatggactactg |
| | | gggccagggaactctggtcactgtgtcatctggtggaggaggtagcggaggaggcg |
| | | ggagcggtggaggtggctccggaggcggtgggtcagaaatcgtgatgacccagagc |
| | | cctgcaaccctgtccctttctcccggggaacgggctaccctttcttgtcgggcatc |
| | | acaagatatctcaaaatacctcaattggtatcaacagaagccgggacaggccccta |
| | | ggcttcttatctaccacacctctcgcctgcatagcgggattcccgcacgctttagc |
| | | gggtctggaagcgggaccgactacactctgaccatctcatctctccagcccgagga |
| | | cttcgccgtctacttctgccagcagggtaacaccctgccgtacaccttcggccagg |
| | | gcaccaagcttgagatcaaaaccactactcccgctccaaggccacccacccctgcc |
| | | ccgaccatcgcctctcagccgctttccctgcgtccggaggcatgtagacccgcagc |
| | | tggtggggccgtgcatacccggggtcttgacttcgcctgcgatatctacatttggg |
| | | cccctctggctggtacttgcggggtcctgctgctttcactcgtgatcactctttac |
| | | tgtaagcgcggtcggaagaagctgctgtacatctttaagcaacccttcatgaggcc |
| | | tgtgcagactactcaagaggaggacggctgttcatgccggttcccagaggaggagg |
| | | aaggcggctgcgaactgcgcgtgaaattcagccgcagcgcagatgctccagcctac |
| | | aagcaggggcagaaccagctctacaacgaactcaatcttggtcggagagaggagta |
| | | cgacgtgctggacaagcggagaggacgggacccagaaatgggcgggaagccgcgca |
| | | gaaagaatccccaagagggcctgtacaacgagctccaaaaggataagatggcagaa |
| | | gcctatagcgagattggtatgaaaggggaacgcagaagaggcaaaggccacgacgg |
| | | actgtaccagggactcagcaccgccaccaaggacacctatgacgctcttcacatgc |
| | | aggccctgccgcctcgg |
| 104882 | 38 | MALPVTALLLPLALLLHAARPqvqlqesgpglvkpsetlsltctvsgvslpdygvs |
| CAR 8 - | | wirqppgkglewigviwgsettyyqsslksrvtiskdnsknqvslklssvtaadta |
| Full - aa | | vyycakhyyyggsyamdywgqgtlvtvssggggsggggsggggsggggseivmtqs |
| | | patlslspgeratlscrasqdiskylnwyqqkpgqaprlliyhtsrlhsgiparfs |
| | | gsgsgtdytltisslqpedfavyfcqqgntlpytfgqgtkleiktttpaprpptpa |
| | | ptiasqplslrpeacrpaaggavhtrgldfacdiyiwaplagtcgvlllslvitly |
| | | ckrgrkkllyifkqpfmrpvqttqeedgcscrfpeeeeggcelrvkfsrsadapay |
| | | kqgqnqlynelnlgrreeydvldkrrgrdpemggkprrknpqeglynelqkdkmae |
| | | ayseigmkgerrrgkghdglyqglstatkdtydalhmqalppr |

CAR9

| | | |
|---|---|---|
| CAR9 scFv | 9 | eivmtqspatlslspgeratlscrasqdiskylnwyqqkpgqaprlliyhtsrlhs |
| domain | | giparfsgsgsgtdytltisslqpedfavyfcqqgntlpytfgqgtkleikggggs |
| | | ggggsggggsggggsqvqlqesgpglvkpsetlsltctvsgvslpdygvswirqpp |
| | | gkglewigviwgsettyynsslksrvtiskdnsknqvslklssvtaadtavyycak |
| | | hyyyggsyamdywgqgtlvtvss |
| 99789 | 69 | atggccctcccagtgaccgctctgctgctgcctctcgcacttcttctccatgccgc |
| CAR9 - | | tcggcctgagatcgtcatgacccaaagccccgctaccctgtccctgtcacccggcg |
| Soluble | | agagggcaaccctttcatgcagggccagccaggacatttctaagtacctcaactgg |
| scFv - nt | | tatcagcagaagccagggcaggctcctcgcctgctgatctaccacaccagccgcct |
| | | ccacagcggtatccccgccagattttccgggagcgggtctggaaccgactacaccc |
| | | tcaccatctcttctctgcagcccgaggatttcgccgtctatttctgccagcagggg |
| | | aatactctgccgtacaccttcggtcaaggtaccaagctggaaatcaagggaggcgg |
| | | aggatcaggcggtggcggaagcggaggaggtggctccggaggaggaggttcccaag |
| | | tgcagcttcaagaatcaggacccggacttgtgaagccatcagaaaccctctccctg |
| | | acttgtaccgtgtccggtgtgagcctccccgactacggagtctcttggattcgcca |
| | | gcctccggggaagggtcttgaatggattggggtgatttggggatcagagactactt |
| | | actacaattcatcacttaagtcacgggtcaccatcagcaaagataatagcaagaac |
| | | caagtgtcacttaagctgtcatctgtgaccgccgctgacaccgccgtgtactattg |
| | | tgccaaacattactattacggagggtcttatgctatggactactggggacagggga |
| | | ccctggtgactgtctctagccatcaccatcaccaccatcatcac |
| 99789 | 81 | MALPVTALLLPLALLLHAARPeivmtqspatlslspgeratlscrasqdiskylnw |
| CAR9 - | | yqqkpgqaprlliyhtsrlhsgiparfsgsgsgtdytltisslqpedfavyfcqqg |
| Soluble | | ntlpytfgqgtkleikggggsggggsggggsggggsqvqlqesgpglvkpsetlsl |
| scFv - aa | | tctvsgvslpdygvswirqppgkglewigviwgsettyynsslksrvtiskdnskn |
| | | qvslklssvtaadtavyycakhyyyggsyamdywgqgtlvtvsshhhhhhhh |
| 105974 | 93 | atggccctccctgtcaccgccctgctgcttccgctggctcttctgctccacgccgc |
| CAR 9 - | | tcggcccgaaattgtgatgacccagtcacccgccactcttagcctttcacccggtg |
| Full - nt | | agcgcgcaaccctgtcttgcagagcctcccaagacatctcaaaataccttaattgg |
| | | tatcaacagaagcccggacaggctcctcgccttctgatctaccacaccagccggct |
| | | ccattctggaatccctgccaggttcagcggtagcggatctgggaccgactacaccc |
| | | tcactatcagctcactgcagccagaggacttcgctgtctatttctgtcagcaaggg |
| | | aacaccctgccctacacctttggacagggcaccaagctcgagattaaaggtggagg |
| | | tggcagcggaggaggtgggtccggcggtggaggaagcggaggcggtgggagccagg |
| | | tccaactccaagaaagcggaccgggtcttgtgaagccatcagaaactctttcactg |
| | | acttgtactgtgagcggagtgtctctccccgattacggggtgtcttggatcagaca |
| | | gccaccggggaagggtctggaatggattggagtgatttggggctctgagactactt |
| | | actacaactcatccctcaagtcacgcgtcaccatctcaaaggacaactctaagaat |
| | | caggtgtcactgaaactgtcatctgtgaccgcagccgacaccgccgtgtactattg |
| | | cgctaagcattactattatggcgggagctacgcaatggattactggggacagggta |
| | | ctctggtcaccgtgtccagcaccactaccccagcaccgaggccacccaccccggct |
| | | cctaccatcgcctcccagcctctgtccctgcgtccggaggcatgtagacccgcagc |
| | | tggtggggccgtgcatacccggggtcttgacttcgcctgcgatatctacatttggg |
| | | cccctctggctggtacttgcggggtcctgctgctttcactcgtgatcactctttac |
| | | tgtaagcgcggtcggaagaagctgctgtacatctttaagcaacccttcatgaggcc |
| | | tgtgcagactactcaagaggaggacggctgttcatgccggttcccagaggaggagg |
| | | aaggcggctgcgaactgcgcgtgaaattcagccgcagcgcagatgctccagcctac |
| | | aagcaggggcagaaccagctctacaacgaactcaatcttggtcggagagaggagta |
| | | cgacgtgctggacaagcggagaggacgggacccagaaatgggcgggaagccgcgca |
| | | gaaagaatccccaagagggcctgtacaacgagctccaaaaggataagatggcagaa |
| | | gcctatagcgagattggtatgaaaggggaacgcagaagaggcaaaggccacgacgg |
| | | actgtaccagggactcagcaccgccaccaaggacacctatgacgctcttcacatgc |
| | | aggccctgccgcctcgg |
| 105974 | 39 | MALPVTALLLPLALLLHAARPeivmtqspatlslspgeratlscrasgdiskylnw |
| CAR 9 - | | yqqkpgqaprlliyhtsrlhsgiparfsgsgsgtdytltisslqpedfavyfcqqg |
| Full - aa | | ntlpytfgqgtkleikggggsggggsggggsggggsqvqlqesgpglvkpsetlsl |
| | | tctvsgvslpdygvswirqppgkglewigviwgsettyynsslksrvtiskdnskn |
| | | qvslklssvtaadtavyycakhyyyggsyamdywgqgtlvtvsstttpaprpptpa |
| | | ptiasqplslrpeacrpaaggavhtrgldfacdiyiwaplagtcgvlllslvitly |
| | | ckrgrkkllyifkqpfmrpvqttqeedgcscrfpeeeeggcelrvkfsrsadapay |
| | | kqgqnqlynelnlgrreeydvldkrrgrdpemggkprrknpqeglynelqkdkmae |
| | | ayseigmkgerrrgkghdglyqglstatkdtydalhmqalppr |

CAR10

| | | |
|---|---|---|
| CAR10 | 10 | qvqlqesgpglvkpsetlsltctvsgvslpdygvswirqppgkglewigviwgset |
| scFv | | tyynsslksrvtiskdnsknqvslklssvtaadtavyycakhyyyggsyamdywgq |
| domain | | gtlvtvssggggsggggsggggsggggseivmtqspatlslspgeratlscrasqd |
| | | iskylnwyqqkpgqaprlliyhtsrlhsgiparfsgsgsgtdytltisslqpedfa |
| | | vyfcqqgntlpytfgqgtkleik |
| 100796 | 70 | atggcactgcctgtcactgccctcctgctgcctctggccctccttctgcatgccgc |
| CAR10 - | | caggccccaagtccagctgcaagagtcaggacccggactggtgaagccgtctgaga |
| Soluble | | ctctctcactgacttgtaccgtcagcggcgtgtccctccccgactacggagtgtca |
| scFv - nt | | tggatccgccaacctcccgggaaagggcttgaatggattggtgtcatctggggttc |
| | | tgaaaccacctactacaactcttccctgaagtccagggtgaccatcagcaaggata |
| | | attccaagaaccaggtcagccttaagctgtcatctgtgaccgctgctgacaccgcc |
| | | gtgtattactgcgccaagcactactattacggaggaagctacgctatggactattg |
| | | gggacagggcactctcgtgactgtgagcagcggcggtggagggtctggaggtggag |
| | | gatccggtggtggtgggtcaggcggaggagggagcgagattgtgatgactcagtca |
| | | ccagccaccctttctctttcacccggcgagagagcaaccctgagctgtagagccag |
| | | ccaggacatttctaagtacctcaactggtatcagcaaaaaccggggcaggcccctc |
| | | gcctcctgatctaccatacctcacgccttcactctggtatccccgctcggtttagc |
| | | ggatcaggatctggtaccgactacactctgaccatttccagcctgcagccagaaga |
| | | tttcgcagtgtatttctgccagcagggcaatacccttccttacaccttcggtcagg |
| | | gaaccaagctcgaaatcaagcaccatcaccatcatcaccaccat |
| 100796 | 82 | MALPVTALLLPLALLLHAARPqvqlqesgpglvkpsetlsltctvsgvslpdygvs |
| CAR10 - | | wirqppgkglewigviwgsettyynsslksrvtiskdnsknqvslklssvtaadta |
| Soluble | | vyycakhyyyggsyamdywgqgtlvtvssggggsggggsggggsggggseivmtqs |
| scFv-aa | | patlslspgeratlscrasqdiskylnwyqqkpgqaprlliyhtsrlhsgiparfs |
| | | gsgsgtdytltisslqpedfavyfcqqgntlpytfgqgtkleikhhhhhhhh |
| 105975 | 94 | atggccctccctgtcaccgccctgctgcttccgctggctcttctgctccacgccgc |
| CAR 10 | | tcggcccgaaattgtgatgacccagtcacccgccactcttagcctttcacccggtg |
| Full - nt | | agcgcgcaaccctgtcttgcagagcctcccaagacatctcaaaataccttaattgg |
| | | tatcaacagaagcccggacaggctcctcgccttctgatctaccacaccagccggct |
| | | ccattctggaatccctgccaggttcagcggtagcggatctgggaccgactacaccc |
| | | tcactatcagctcactgcagccagaggacttcgctgtctatttctgtcagcaaggg |
| | | aacaccctgccctacacctttggacagggcaccaagctcgagattaaaggtggagg |
| | | tggcagcggaggaggtgggtccggcggtggaggaagcggaggcggtgggagccagg |
| | | tccaactccaagaaagcggaccgggtcttgtgaagccatcagaaactctttcactg |
| | | acttgtactgtgagcggagtgtctctccccgattacggggtgtcttggatcagaca |
| | | gccaccggggaagggtctggaatggattggagtgatttggggctctgagactactt |
| | | actacaactcatccctcaagtcacgcgtcaccatctcaaaggacaactctaagaat |
| | | caggtgtcactgaaactgtcatctgtgaccgcagccgacaccgccgtgtactattg |
| | | cgctaagcattactattatggcgggagctacgcaatggattactggggacagggta |
| | | ctctggtcaccgtgtccagcaccactaccccagcaccgaggccacccaccccggct |
| | | cctaccatcgcctcccagcctctgtccctgcgtccggaggcatgtagacccgcagc |
| | | tggtggggccgtgcatacccggggtcttgacttcgcctgcgatatctacatttggg |
| | | cccctctggctggtacttgcggggtcctgctgctttcactcgtgatcactctttac |
| | | tgtaagcgcggtcggaagaagctgctgtacatctttaagcaacccttcatgaggcc |
| | | tgtgcagactactcaagaggaggacggctgttcatgccggttcccagaggaggagg |
| | | aaggcggctgcgaactgcgcgtgaaattcagccgcagcgcagatgctccagcctac |
| | | aagcaggggcagaaccagctctacaacgaactcaatcttggtcggagagaggagta |
| | | cgacgtgctggacaagcggagaggacgggacccagaaatgggcgggaagccgcgca |
| | | gaaagaatccccaagagggcctgtacaacgagctccaaaaggataagatggcagaa |
| | | gcctatagcgagattggtatgaaaggggaacgcagaagaggcaaaggccacgacgg |
| | | actgtaccagggactcagcaccgccaccaaggacacctatgacgctcttcacatgc |
| | | aggccctgccgcctcgg |
| 105975 | 40 | MALPVTALLLPLALLLHAARPEIVMTQSPATLSLSPGERATLSCRASQDISKYLNW |
| CAR 10 | | YQQKPGQAPRLLIYHTSRLHSGIPARFSGSGSGTDYTLTISSLQPEDFAVYFCQQG |
| Full - aa | | NTLPYTFGQGTKLEIKGGGGSGGGGSGGGGSGGGGSQVQLQESGPGLVKPSETLSL |
| | | TCTVSGVSLPDYGVSWIRQPPGKGLEWIGVIWGSETTYYNSSLKSRVTISKDNSKN |
| | | QVSLKLSSVTAADTAVYYCAKHYYYGGSYAMDYWGQGTLVTVSSTTTPAPRPPTPA |
| | | PTIASQPLSLRPEACRPAAGGAVHTRGLDFACDIYIWAPLAGTCGVLLLSLVITLY |
| | | CKRGRKKLLYIFKQPFMRPVQTTQEEDGCSCRFPEEEEGGCELRVKFSRSADAPAY |
| | | KQGQNQLYNELNLGRREEYDVLDKRRGRDPEMGGKPRRKNPQEGLYNELQKDKMAE |
| | | AYSEIGMKGERRRGKGHDGLYQGLSTATKDTYDALHMQALPPR |

CAR11

| | | |
|---|---|---|
| CAR11 | 11 | eivmtqspatlslspgeratlscrasqdiskylnwyqqkpgqaprlliyhtsrlhs |
| scFv | | giparfsgsgsgtdytltisslqpedfavyfcqqgntlpytfgqgtkleikggggs |
| domain | | ggggsggggsqvqlqesgpglvkpsetlsltctvsgvslpdygvswirqppgkgle |
| | | wigviwgsettyynsslksrvtiskdnsknqvslklssvtaadtavyycakhyyyg |
| | | gsyamdywgqgtlvtvss |
| 103101 | 71 | Atggccctccctgtcaccgccctgctgcttccgctggctcttctgctccacgccgc |
| CAR11 - | | tcggcccgaaattgtgatgacccagtcacccgccactcttagcctttcacccggtg |
| Soluble | | agcgcgcaaccctgtcttgcagagcctcccaagacatctcaaaataccttaattgg |
| scFv - nt | | tatcaacagaagcccggacaggctcctcgccttctgatctaccacaccagccggct |
| | | ccattctggaatccctgccaggttcagcggtagcggatctgggaccgactacaccc |
| | | tcactatcagctcactgcagccagaggacttcgctgtctatttctgtcagcaaggg |
| | | aacaccctgccctacacctttggacagggcaccaagctcgagattaaaggtggagg |
| | | tggcagcggaggaggtgggtccggcggtggaggaagccaggtccaactccaagaaa |
| | | gcggaccgggtcttgtgaagccatcagaaactctttcactgacttgtactgtgagc |
| | | ggagtgtctctccccgattacggggtgtcttggatcagacagccaccggggaaggg |
| | | tctggaatggattggagtgatttggggctctgagactacttactacaattcatccc |
| | | tcaagtcacgcgtcaccatctcaaaggacaactctaagaatcaggtgtcactgaaa |
| | | ctgtcatctgtgaccgcagccgacaccgccgtgtactattgcgctaagcattacta |
| | | ttatggcgggagctacgcaatggattactggggacagggtactctggtcaccgtgt |
| | | ccagccaccaccatcatcaccatcaccat |
| 103101 | 83 | MALPVTALLLPLALLLHAARPeivmtqspatlslspgeratlscrasqdiskylnw |
| CAR11 - | | yqqkpgqaprlliyhtsrlhsgiparfsgsgsgtdytltisslqpedfavyfcqqg |
| Soluble | | ntlpytfgqgtkleikggggsggggsggggsqvqlqesgpglvkpsetlsltctvs |
| scFv - aa | | gvslpdygvswirqppgkglewigviwgsettyynsslksrvtiskdnsknqvslk |
| | | lssvtaadtavyycakhyyyggsyamdywgqgtlvtvsshhhhhhhh |
| 105976 | 95 | atggctctgcccgtgaccgcactcctcctgccactggctctgctgcttcacgccgc |
| CAR 11 | | tcgcccacaagtccagcttcaagaatcagggcctggtctggtgaagccatctgaga |
| Full - nt | | ctctgtccctcacttgcaccgtgagcggagtgtccctcccagactacggagtgagc |
| | | tggattagacagcctcccggaaagggactggagtggatcggagtgatttggggtag |
| | | cgaaaccacttactataactcttccctgaagtcacgggtcaccatttcaaaggata |
| | | actcaaagaatcaagtgagcctcaagctctcatcagtcaccgccgctgacaccgcc |
| | | gtgtattactgtgccaagcattactactatggagggtcctacgccatggactactg |
| | | gggccagggaactctggtcactgtgtcatctggtggaggaggtagcggaggaggcg |
| | | ggagcggtggaggtggctccggaggtggcggaagcgaaatcgtgatgacccagagc |
| | | cctgcaaccctgtccctttctcccggggaacgggctaccctttcttgtcgggcatc |
| | | acaagatatctcaaaatacctcaattggtatcaacagaagccgggacaggccccta |
| | | ggcttcttatctaccacacctctcgcctgcatagcgggattcccgcacgctttagc |
| | | gggtctggaagcgggaccgactacactctgaccatctcatctctccagcccgagga |
| | | cttcgccgtctacttctgccagcagggtaacaccctgccgtacaccttcggccagg |
| | | gcaccaagcttgagatcaaaaccactactcccgctccaaggccacccacccctgcc |
| | | ccgaccatcgcctctcagccgctttccctgcgtccggaggcatgtagacccgcagc |
| | | tggtggggccgtgcatacccggggtcttgacttcgcctgcgatatctacatttggg |
| | | cccctctggctggtacttgcggggtcctgctgctttcactcgtgatcactctttac |
| | | tgtaagcgcggtcggaagaagctgctgtacatctttaagcaacccttcatgaggcc |
| | | tgtgcagactactcaagaggaggacggctgttcatgccggttcccagaggaggagg |
| | | aaggcggctgcgaactgcgcgtgaaattcagccgcagcgcagatgctccagcctac |
| | | aagcaggggcagaaccagctctacaacgaactcaatcttggtcggagagaggagta |
| | | cgacgtgctggacaagcggagaggacgggacccagaaatgggcgggaagccgcgca |
| | | gaaagaatccccaagagggcctgtacaacgagctccaaaaggataagatggcagaa |
| | | gcctatagcgagattggtatgaaaggggaacgcagaagaggcaaaggccacgacgg |
| | | actgtaccagggactcagcaccgccaccaaggacacctatgacgctcttcacatgc |
| | | aggccctgccgcctcgg |
| 105976 | 41 | MALPVTALLLPLALLLHAARPQVQLQESGPGLVKPSETLSLTCTVSGVSLPDYGVS |
| CAR 11 | | WIRQPPGKGLEWIGVIWGSETTYYNSSLKSRVTISKDNSKNQVSLKLSSVTAADTA |
| Full - aa | | VYYCAKHYYYGGSYAMDYWGQGTLVTVSSGGGGSGGGGSGGGGSGGGGSEIVMTQS |
| | | PATLSLSPGERATLSCRASQDISKYLNWYQQKPGQAPRLLIYHTSRLHSGIPARFS |
| | | GSGSGTDYTLTISSLQPEDFAVYFCQQGNTLPYTFGQGTKLEIKTTTPAPRPPTPA |
| | | PTIASQPLSLRPEACRPAAGGAVHTRGLDFACDIYIWAPLAGTCGVLLLSLVITLY |
| | | CKRGRKKLLYIFKQPFMRPVQTTQEEDGCSCRFPEEEEGGCELRVKFSRSADAPAY |
| | | KQGQNQLYNELNLGRREEYDVLDKRRGRDPEMGGKPRRKNPQEGLYNELQKDKMAE |
| | | AYSEIGMKGERRRGKGHDGLYQGLSTATKDTYDALHMQALPPR |

CAR12

| | | |
|---|---|---|
| CAR12 | 12 | qvqlqesgpglvkpsetlsltctvsgvslpdygvswirqppgkglewigviwgset |
| scFv | | tyynsslksrvtiskdnsknqvslklssvtaadtavyycakhyyyggsyamdywgq |
| domain | | gtlvtvssggggsggggsggggseivmtqspatlslspgeratlscrasqdiskyl |
| | | nwyqqkpgqaprlliyhtsrlhsgiparfsgsgsgtdytltisslqpedfavyfcq |
| | | qgntlpytfgqgtkleik |
| 103104 | 72 | atggctctgcccgtgaccgcactcctcctgccactggctctgctgcttcacgccgc |
| CAR12 - | | tcgcccacaagtccagcttcaagaatcagggcctggtctggtgaagccatctgaga |
| Soluble | | ctctgtccctcacttgcaccgtgagcggagtgtccctcccagactacggagtgagc |
| scFv - nt | | tggattagacagcctcccggaaagggactggagtggatcggagtgatttggggtag |
| | | cgaaaccacttactataactcttccctgaagtcacgggtcaccatttcaaaggata |
| | | actcaaagaatcaagtgagcctcaagctctcatcagtcaccgccgctgacaccgcc |
| | | gtgtattactgtgccaagcattactactatggagggtcctacgccatggactactg |
| | | gggccagggaactctggtcactgtgtcatctggtggaggaggtagcggaggaggcg |
| | | ggagcggtggaggtggctccgaaatcgtgatgacccagagccctgcaaccctgtcc |
| | | ctttctcccggggaacgggctaccctttcttgtcgggcatcacaagatatctcaaa |
| | | atacctcaattggtatcaacagaagccgggacaggcccctaggcttcttatctacc |
| | | acacctctcgcctgcatagcgggattcccgcacgctttagcgggtctggaagcggg |
| | | accgactacactctgaccatctcatctctccagcccgaggacttcgccgtctactt |
| | | ctgccagcagggtaacaccctgccgtacaccttcggccagggcaccaagcttgaga |
| | | tcaaacatcaccaccatcatcaccatcac |
| 103104 | 84 | MALPVTALLLPLALLLHAARPqvqlqesgpglvkpsetlsltctvsgvslpdygvs |
| CAR12 - | | wirqppgkglewigviwgsettyynsslksrvtiskdnsknqvslklssvtaadta |
| Soluble | | vyycakhyyyggsyamdywgqgtlvtvssggggsggggsggggseivmtqspatls |
| scFv -aa | | lspgeratlscrasqdiskylnwyqqkpgqaprlliyhtsrlhsgiparfsgsgsg |
| | | tdytltisslqpedfavyfcqqgntlpytfgqgtkleikhhhhhhhh |
| 105977 | 96 | atggccctccctgtcaccgccctgctgcttccgctggctcttctgctccacgccgc |
| CAR 12 - | | tcggcccgaaattgtgatgacccagtcacccgccactcttagcctttcacccggtg |
| Full - nt | | agcgcgcaaccctgtcttgcagagcctcccaagacatctcaaaataccttaattgg |
| | | tatcaacagaagcccggacaggctcctcgccttctgatctaccacaccagccggct |
| | | ccattctggaatccctgccaggttcagcggtagcggatctgggaccgactacaccc |
| | | tcactatcagctcactgcagccagaggacttcgctgtctatttctgtcagcaaggg |
| | | aacaccctgccctacacctttggacagggcaccaagctcgagattaaaggtggagg |
| | | tggcagcggaggaggtgggtccggcggtggaggaagccaggtccaactccaagaaa |
| | | gcggaccgggtcttgtgaagccatcagaaactctttcactgacttgtactgtgagc |
| | | ggagtgtctctccccgattacggggtgtcttggatcagacagccaccggggaaggg |
| | | tctggaatggattggagtgatttggggctctgagactacttactacaactcatccc |
| | | tcaagtcacgcgtcaccatctcaaaggacaactctaagaatcaggtgtcactgaaa |
| | | ctgtcatctgtgaccgcagccgacaccgccgtgtactattgcgctaagcattacta |
| | | ttatggcgggagctacgcaatggattactggggacagggtactctggtcaccgtgt |
| | | ccagcaccactaccccagcaccgaggccacccaccccggctcctaccatcgcctcc |
| | | cagcctctgtccctgcgtccggaggcatgtagacccgcagctggtggggccgtgca |
| | | tacccggggtcttgacttcgcctgcgatatctacatttgggcccctctggctggta |
| | | cttgcggggtcctgctgctttcactcgtgatcactctttactgtaagcgcggtcgg |
| | | aagaagctgctgtacatctttaagcaacccttcatgaggcctgtgcagactactca |
| | | agaggaggacggctgttcatgccggttcccagaggaggaggaaggcggctgcgaac |
| | | tgcgcgtgaaattcagccgcagcgcagatgctccagcctacaagcaggggcagaac |
| | | cagctctacaacgaactcaatcttggtcggagagaggagtacgacgtgctggacaa |
| | | gcggagaggacgggacccagaaatgggcgggaagccgcgcagaaagaatccccaag |
| | | agggcctgtacaacgagctccaaaaggataagatggcagaagcctatagcgagatt |
| | | ggtatgaaaggggaacgcagaagaggcaaaggccacgacggactgtaccagggact |
| | | cagcaccgccaccaaggacacctatgacgctcttcacatgcaggccctgccgcctc |
| | | gg |
| 105977 | 42 | MALPVTALLLPLALLLHAARPEIVMTQSPATLSLSPGERATLSCRASQDISKYLNW |
| CAR 12 - | | YQQKPGQAPRLLIYHTSRLHSGIPARFSGSGSGTDYTLTISSLQPEDFAVYFCQQG |
| Full - aa | | NTLPYTFGQGTKLEIKGGGGSGGGGSGGGGSQVQLQESGPGLVKPSETLSLTCTVS |
| | | GVSLPDYGVSWIRQPPGKGLEWIGVIWGSETTYYNSSLKSRVTISKDMSKMQVSLK |
| | | LSSVTAADTAVYYCAKHYYYGGSYAMDYWGQGTLVTVSSTTTPAPRPPTPAPTIAS |
| | | QPLSLRPEACRPAAGGAVHTRGLDFACDIYIWAPLAGTCGVLLLSLVITLYCKRGR |
| | | KKLLYIFKQPFMRPVQTTQEEDGCSCREPEEEEGGCELRVKFSRSADAPAYKQGQN |
| | | QLYNELNLGRREEYDVLDKRRGRDPEMGGKPRRKMPQEGLYNELQKDKMAEAYSEI |
| | | GMKGERRRGKGHDGLYQGLSTATKDTYDALHMQALPPR |

TABLE 3
Murine CD19 CAR Constructs
CTL019

| | | |
|---|---|---|
| CTL019- | 97 | Atggccctgcccgtcaccgctctgctgctgccccttgctctgcttcttcatgcagc |
| Soluble | | aaggccggacatccagatgacccaaaccacctcatccctctctgcctctcttggag |
| scFv-Histag- | | acagggtgaccatttcttgtcgcgccagccaggacatcagcaagtatctgaactgg |
| nt | | tatcagcagaagccggacggaaccgtgaagctcctgatctaccatacctctcgcct |
| | | gcatagcggcgtgccctcacgcttctctggaagcggatcaggaaccgattattctc |
| | | tcactatttcaaatcttgagcaggaagatattgccacctatttctgccagcagggt |
| | | aataccctgccctacaccttcggaggagggaccaagctcgaaatcaccggtggagg |
| | | aggcagcggcggtggagggtctggtggaggtggttctgaggtgaagctgcaagaat |
| | | caggccctggacttgtggccccttcacagtccctgagcgtgacttgcaccgtgtcc |
| | | ggagtctccctgcccgactacggagtgtcatggatcagacaacctccacggaaagg |
| | | actggaatggctcggtgtcatctggggtagcgaaactacttactacaattcagccc |
| | | tcaaaagcaggctgactattatcaaggacaacagcaagtcccaagtctttcttaag |
| | | atgaactcactccagactgacgacaccgcaatctactattgtgctaagcactacta |
| | | ctacggaggatcctacgctatggattactggggacaaggtacttccgtcactgtct |
| | | cttcacaccatcatcaccatcaccatcac |
| CTL019- | 98 | MALPVTALLLPLALLLHAARPdiqmtqttsslsaslgdrvtiscrasqdiskylnw |
| Soluble | | yqqkpdgtvklliyhtsrlhsgvpsrfsgsgsgtdysltisnleqediatyfcqqg |
| scFv-Histag- | | ntlpytfgggtkleitggggsggggsggggsevklqesgpglvapsqslsvtctvs |
| aa | | gvslpdygvswirqpprkglewlgviwgsettyynsalksrltiikdnsksqvflk |
| | | mnslqtddtaiyycakhyyyggsyamdywgqgtsvtvsshhhhhhhh |
| CTL019 | 99 | atggccttaccagtgaccgccttgctcctgccgctggccttgctgctccacgccgc |
| Full-nt | | caggccggacatccagatgacacagactacatcctccctgtctgcctctctgggag |
| | | acagagtcaccatcagttgcagggcaagtcaggacattagtaaatatttaaattgg |
| | | tatcagcagaaaccagatggaactgttaaactcctgatctaccatacatcaagatt |
| | | acactcaggagtcccatcaaggttcagtggcagtgggtctggaacagattattctc |
| | | tcaccattagcaacctggagcaagaagatattgccacttacttttgccaacagggt |
| | | aatacgcttccgtacacgttcggaggggggaccaagctggagatcacaggtggcgg |
| | | tggctcgggcggtggtgggtcgggtggcggcggatctgaggtgaaactgcaggagt |
| | | caggacctggcctggtggcgccctcacagagcctgtccgtcacatgcactgtctca |
| | | ggggtctcattacccgactatggtgtaagctggattcgccagcctccacgaaaggg |
| | | tctggagtggctgggagtaatatggggtagtgaaaccacatactataattcagctc |
| | | tcaaatccagactgaccatcatcaaggacaactccaagagccaagttttcttaaaa |
| | | atgaacagtctgcaaactgatgacacagccatttactactgtgccaaacattatta |
| | | ctacggtggtagctatgctatggactactggggccaaggaacctcagtcaccgtct |
| | | cctcaaccacgacgccagcgccgcgaccaccaacaccggcgcccaccatcgcgtcg |
| | | cagcccctgtccctgcgcccagaggcgtgccggccagcggcggggggcgcagtgca |
| | | cacgagggggctggacttcgcctgtgatatctacatctgggcgcccttggccggga |
| | | cttgtggggtccttctcctgtcactggttatcaccctttactgcaaacggggcaga |
| | | aagaaactcctgtatatattcaaacaaccatttatgagaccagtacaaactactca |
| | | agaggaagatggctgtagctgccgatttccagaagaagaagaaggaggatgtgaac |
| | | tgagagtgaagttcagcaggagcgcagacgcccccgcgtacaagcagggccagaac |
| | | cagctctataacgagctcaatctaggacgaagagaggagtacgatgttttggacaa |
| | | gagacgtggccgggaccctgagatggggggaaagccgagaaggaagaaccctcagg |
| | | aaggcctgtacaatgaactgcagaaagataagatggcggaggcctacagtgagatt |
| | | gggatgaaaggcgagcgccggaggggcaaggggcacgatggcctttaccagggtct |
| | | cagtacagccaccaaggacacctacgacgcccttcacatgcaggccctgccccctc |
| | | gc |
| CTL019 | 58 | MALPVTALLLPLALLLHAARPdiqmtqttsslsaslgdrvtiscrasqdiskylnw |
| Full-aa | | yqqkpdgtvklliyhtsrlhsgvpsrfsgsgsgtdysltisnleqediatyfcqqg |
| | | ntlpytfgggtkleitggggsggggsggggsevklqesgpglvapsqslsvtctvs |
| | | gvslpdygvswirqpprkglewlgviwgsettyynsalksrltiikdnsksqvflk |
| | | mnslqtddtaiyycakhyyyggsyamdywgqgtsvtvsstttpaprpptpaptias |
| | | qplslrpeacrpaaggavhtrgldfacdiyiwaplagtogvlllslvitlyckrgr |
| | | kkllyifkqpfmrpvqttgeedgcscrfpeeeeggcelrvkfsrsadapaykqgqn |
| | | qlynelnlgrreeydvldkrrgrdpemggkprrknpqeglynelqkdkmaeaysei |
| | | gmkgerrrgkghdglyqglstatkdtydalhmqalppr |
| CTL019 | 59 | Diqmtqttsslsaslgdrvtiscrasqdiskylnwyqqkpdgtvklliyhtsrlhs |
| scFv | | gvpsrfsgsgsgtdysltisnleqediatyfcqqgntlpytfgggtkleitggggs |
| domain | | ggggsggggsevklqesgpglvapsqslsvtctvsgvslpdygvswirqpprkgle |
| | | wlgviwgsettyynsalksrltiikdnsksqvflkmnslqtddtaiyycakhyyyg |
| | | gsyamdywgqgtsvtvss |
| mCAR1 | 109 | QVQLLESGAELVRPGSSVKISCKASGYAFSSYWMNWVKQRPGQGLEWIGQIYPGDG |
| scFv | | DTNYNGKFKGQATLTADKSSSTAYMQLSGLTSEDSAVYSCARKTISSVVDFYFDYW |
| | | GQGTTVTGGGSGGGSGGGSGGGSELVLTQSPKFMSTSVGDRVSVTCKASQNVGTNV |
| | | AWYQQKPGQSPKPLIYSATYRNSGVPDRFTGSGSGTDFTLTITNVQSKDLADYFCQ |
| | | YNRYPYTSFFFTKLEIKRRS |
| mCAR1 | 110 | QVQLLESGAELVRPGSSVKISCKASGYAFSSYWMNWVKQRPGQGLEWIGQIYPGDG |
| Full-aa | | DTNYNGKFKGQATLTADKSSSTAYMQLSGLTSEDSAVYSCARKTISSVVDFYFDYW |
| | | GQGTTVTGGGSGGGSGGGSGGGSELVLTQSPKFMSTSVGDRVSVTCKASQNVGTNV |
| | | AWYQQKPGQSPKPLIYSATYRNSGVPDRFTGSGSGTDFTLTITNVQSKDLADYFCQ |
| | | YNRYPYTSFFFTKLEIKRRSKIEVMYPPPYLDNEKSNGTIIHVKGKHLCPSPLFPG |
| | | PSKPFWVLVVVGGVLACYSLLVTVAFIIFWVRSKRSRLLHSDYMNMTPRRPGPTRK |
| | | HYQPYAPPRDFAAYRSRVKFSRSADAPAYQQGQNQLYNELNLGRREEYDVLDKRRG |
| | | RDPEMGGKPRRKNPQEGLYNELQKDKMAEAYSEIGMKGERRRGKGHDGLYQGLSTA |
| | | TKDTYDALHMQALPPR |
| mCAR2 | 111 | DIQMTQTTSSLSASLGDRVTISCRASQDISKYLNWYQQKPDGTVKLLIYHTSRLHS |
| scFv | | GVPSRFSGSGSGTDYSLTISNLEQEDIATYFCQQGNTLPYTFGGGTKLEITGSTSG |
| | | SGKPGSGEGSTKGEVKLQESGPGLVAPSQSLSVTCTVSGVSLPDYGVSWIRQPPRK |
| | | GLEWLGVIWGSETTYYNSALKSRLTIIKDNSKSQVFLKMNSLQTDDTAIYYCAKHY |
| | | YYGGSYAMDYWGQGTSVTVSSE |
| mCAR2 | 112 | DIQMTQTTSSLSASLGDRVTISCRASQDISKYLNWYQQKPDGTVKLLIYHTSRLHS |
| CAR-aa | | GVPSRFSGSGSGTDYSLTISNLEQEDIATYFCQQGNTLPYTFGGGTKLEITGSTSG |
| | | SGKPGSGEGSTKGEVKLQESGPGLVAPSQSLSVTCTVSGVSLPDYGVSWIRQPPRK |
| | | GLEWLGVIWGSETTYYNSALKSRLTIIKDNSKSQVFLKMNSLQTDDTAIY |
| | | YCAKHYYYGGSYAMDYWGQGTSVTVSSESKYGPPCPPCPMFWVLVVVGGVLACYSL |
| | | LVTVAFIIFWVKRGRKKLLYIFKQPFMRPVQTTQEEDGCSCRFEEEEGGCELRVKF |
| | | SRSADAPAYQQGQNQLYNELNLGRREEYDVLDKRRGRDPEMGGKPRRKNPQEGLYN |
| | | ELQKDKMAEAYSEIGMKGERRRGKGHDGLYQGLSTATKDTYDALHMQALPPRL |
| mCAR2 | 113 | DIQMTQTT SSLSASLGDR VTISCRASQD ISKYLNWYQQ KPDGTVKLLI |
| Full-aa | | YHTSRLHSGV PSRFSGSGSG TDYSLTISNL EQEDIATYFC QQGNTLPYTF |
| | | GGGTKLEITG STSGSGKPGS GEGSTKGEVK LQESGPGLVA PSQSLSVTCT |
| | | VSGVSLPDYG VSWIRQPPRK GLEWLGVIWG SETTYYNSAL KSRLTIIKDN |
| | | SKSQVFLKMN SLQTDDTAIY YCAKHYYYGG SYAMDYWGQG TSVTVSSESK |
| | | YGPPCPPCPM FWVLVVVGGV LACYSLLVTV |
| | | AFIIFWVKRG RKKLLYIFKQ PFMRPVQTTQ EEDGCSCRFE EEEGGCELRV |
| | | KFSRSADAPA YQQGQNQLYN ELNLGRREEY DVLDKRRGRD PEMGGKPRRK |
| | | NPQEGLYNEL QKDKMAEAYS EIGMKGERRR GKGHDGLYQG LSTATKDTYD |
| | | ALHMQALPPR LEGGGEGRGS LLTCGDVEEN PGPRMLLLVT SLLLCELPHP |
| | | AFLLIPRKVC NGIGIGEFKD SLSINATNIK HFKNCTSISG DLHILPVAFR |
| | | GDSFTHTPPL DPQELDILKT VKEITGFLLI QAWPENRTDL HAFENLEIIR |
| | | GRTKQHGQFS LAVVSLNITS LGLRSLKEIS DGDVIISGNK NLCYANTINW |
| | | KKLFGTSGQK TKIISNRGEN SCKATGQVCH ALCSPEGCWG PEPRDCVSCR |
| | | NVSRGRECVD KCNLLEGEPR EFVENSECIQ CHPECLPQAM NITCTGRGPD |
| | | NCIQCAHYID GPHCVKTCPA GVMGENNTLV WKYADAGHVC HLCHPNCTYG |
| | | CTGPGLEGCP TNGPKIPSIA TGMVGALLLL LVVALGIGLF M |
| mCAR3 | 114 | DIQMTQTTSSLSASLGDRVTISCRASQDISKYLNWYQQKPDGTVKLLIYHTSRLHS |
| scFv | | GVPSRFSGSGSGTDYSLTISNLEQEDIATYFCQQGNTLPYTFGGGTKLEITGSTSG |
| | | SGKPGSGEGSTKGEVKLQESGPGLVAPSQSLSVTCTVSGVSLPDYGVSWIRQPPRK |
| | | GLEWLGVIWGSETTYYNSALKSRLTIIKDNSKSQVFLKMNSLQTDDTAIYYCAKHY |
| | | YYGGSYAMDYWGQGTSVTVSS |
| mCAR3 | 115 | DIQMTQTTSSLSASLGDRVTISCRASQDISKYLNWYQQKPDGTVKLLIYHTSRLHS |
| Full-aa | | GVPSRFSGSGSGTDYSLTISNLEQEDIATYFCQQGNTLPYTFGGGTKLEITGSTSG |
| | | SGKPGSGEGSTKGEVKLQESGPGLVAPSQSLSVTCTVSGVSLPDYGVSWIRQPPRK |
| | | GLEWLGVIWGSETTYYNSALKSRLTIIKDNSKSQVFLKMNSLQTDDTAIYYCAKHY |
| | | YYGGSYAMDYWGQGTSVTVSSAAAIEVMYPPPYLDNEKSNGTIIHVKGKHLCPSPL |
| | | FPGPSKPFWVLVVVGGVLACYSLLVTVAFIIFWVRSKRSRLLHSDYMNMTPRRPGP |
| | | TRKHYQPYAPPRDFAAYRSRVKFSRSADAPAYQQGQNQLYNELNLGRREEYDVLDK |
| | | RRGRDPEMGGKPRRKNPQEGLYNELQKDKMAEAYSEIGMKGERRRGKGHDGLYQGL |
| | | STATKDTYDALHMQALPPR |
| SSJ25-C1 | | QVQLLESGAELVRPGSSVKISCKASGYAFSSYWMNWVKQRPGQGLEWIGQIYPGDG |
| VH | | DTNYNGKFKGQATLTADKSSSTAYMQLSGLTSEDSAVYSCARKTISSVVDFYFDYW |
| sequence | | GQGTTVT |
| SSJ25-C1 | | ELVLTQSPKFMSTSVGDRVSVTCKASQNVGTNVAWYQQKPGQSPKPLIYSATYRNS |
| VL | | GVPDRFTGSGSGTDFTLTITNVQSKDLADYFYFCQYNRYPYTSGGGTKLEIKRRS |
| sequence | | |

TABLE 4
Heavy Chain Variable Domain CDRs

| Candidate | FW | HCDR1 | ID | HCDR2 | ID | HCDR3 | ID |
|---|---|---|---|---|---|---|---|
| murine_CART19 | | GVSLPDYGVS | 19 | VIWGSETTYYNSALKS | 20 | HYYYGGSYAMDY | 24 |
| humanized_CART19 a | VH4 | GVSLPDYGVS | 19 | VIWGSETTYYSSSLKS | 21 | HYYYGGSYAMDY | 24 |
| humanized_CART19 b | VH4 | GVSLPDYGVS | 19 | VIWGSETTYYQSSLKS | 22 | HYYYGGSYAMDY | 24 |
| humanized_CART19 c | VH4 | GVSLPDYGVS | 19 | VIWGSETTYYNSSLKS | 23 | HYYYGGSYAMDY | 24 |

TABLE 5
Light Chain Variable Domain CDRs

| Candidate | FW | LCDR1 | ID | LCDR2 | ID | LCDR3 | ID |
|---|---|---|---|---|---|---|---|
| murine_CART19 | | RASQDISKYLN | 25 | HTSRLHS | 26 | QQGNTLPYT | 27 |
| humanized_CART19 a | VK3 | RASQDISKYLN | 25 | HTSRLHS | 26 | QQGNTLPYT | 27 |
| humanized_CART19 b | VK3 | RASQDISKYLN | 25 | HTSRLHS | 26 | QQGNTLPYT | 27 |
| humanized_CART19 c | VK3 | RASQDISKYLN | 25 | HTSRLHS | 26 | QQGNTLPYT | 27 |

[0574] Provided herein are CD19 inhibitors and combination therapies. In some embodiments, the CD19 inhibitor (e.g., a cell therapy, e.g., a CD19-expressing CAR, or an antibody) is administered in combination with a B cell inhibitor, e.g., one or more inhibitors of CD10, CD19, CD20, CD22, CD34, CD123, FLT-3, or ROR1. A CD19 inhibitor includes but is not limited to a CD19 CAR-expressing cell, e.g., a CD19 CART cell, or an anti-CD19 antibody (e.g., an anti-CD19 mono- or bispecific antibody) or a fragment or conjugate thereof. In an embodiment, the CD19 inhibitor is administered in combination with a B-cell inhibitor, e.g., a CAR-expressing cell described herein.

[0575] In some other embodiments, the CD19 inhibitor is administered in combination with a B-cell inhibitor, and their use in medicaments or methods for treating, among other diseases, cancer or any malignancy or autoimmune diseases involving cells or tissues which express CD19.

[0576] Numerous CD19 CAR-expressing cells are described in this disclosure. For instance, in some embodiments, a CD19 inhibitor includes an anti-CD19 CAR-expressing cell, e.g., CART, e.g., a cell expressing an anti-CD19 CAR construct described in Table 2, e.g., CTL119, or encoded by a CD19 binding CAR comprising a scFv, CDRs, or VH and VL chains described in Tables 2, 4, or 5. For example, an anti-CD19 CAR-expressing cell, e.g., CART, is a generated by engineering a CD19-CAR (that comprises a CD19 binding domain) into a cell (e.g., a T cell or NK cell), e.g., for administration in combination with a CAR-expressing cell described herein. Also provided herein are methods of use of the CAR-expressing cells described herein for adoptive therapy.

### BCMA Binding Domains and CARs

[0577] In embodiments the BCMA CAR comprises an anti-BCMA binding domain (e.g., human or humanized anti-BCMA binding domain), a transmembrane domain, and an intracellular signaling domain, and wherein said anti-BCMA binding domain comprises a heavy chain complementary determining region 1 (HC CDR1), a heavy chain complementary determining region 2 (HC CDR2), and a heavy chain complementary determining region 3 (HC CDR3) of any anti-BMCA heavy chain binding domain amino acid sequences listed in Table 4D or 4E.

[0578] In one embodiment, the anti-BCMA binding domain comprises a light chain variable region described herein (e.g., in Table 4D or 4E) and/or a heavy chain variable region described herein (e.g., in Table 4D or 4E).

[0579] In one embodiment, the encoded anti-BCMA binding domain is a scFv comprising a light chain and a heavy chain of an amino acid sequence of Table 4D or 4E.

[0580] In an embodiment, the human or humanized anti-BCMA binding domain (e.g., an scFv) comprises: a light chain variable region comprising an amino acid sequence having at least one, two or three modifications (e.g., substitutions, e.g., conservative substitutions) but not more than 30, 20 or 10 modifications (e.g., substitutions, e.g., conservative substitutions) of an amino acid sequence of a light chain variable region provided in Table 4D or 4E, or a sequence with at least 95% (e.g., 95-99%) identity thereof; and/or a heavy chain variable region comprising an amino acid sequence having at least one, two or three modifications (e.g., substitutions, e.g., conservative substitutions) but not more than 30, 20 or 10 modifications (e.g., substitutions, e.g., conservative substitutions) of an amino acid sequence of a heavy chain variable region provided in Table 4D or 4E, or a sequence with at least 95% (e.g., 95-99%) identity thereof.

TABLE 4D
Amino Acid and Nucleic Acid Sequences of exemplary anti-BCMA scFv
domains and BCMA CAR molecules

| | | |
|---|---|---|
| Name/ | SEQ | |
| Description | ID NO: | Sequence |

139109

| | | |
|---|---|---|
| 139109-aa | 1400 | EVQLVESGGGLVQPGGSLRLSCAVSGFALSNHGMSWVRRAPGKGLEWV |
| ScFv | | SGIVYSGSTYYAASVKGRFTISRDNSRNTLYLQMNSLRPEDTAIYYCS |
| domain | | AHGGESDVWGQGTTVTVSSASGGGGSGGRASGGGGSDIQLTQSPSSLS |
| | | ASVGDRVTITCRASQSISSYLNWYQQKPGKAPKLLIYAASSLQSGVPS |
| | | RFSGSGSGTDFTLTISSLQPEDFATYYCQQSYSTPYTFGQGTKVEIK |
| 139109-nt | 1401 | GAAGTGCAATTGGTGGAATCAGGGGGAGGACTTGTGCAGCCTGGAGGA |
| ScFv | | TCGCTGAGACTGTCATGTGCCGTGTCCGGCTTTGCCCTGTCCAACCAC |
| domain | | GGGATGTCCTGGGTCCGCCGCGCGCCTGGAAAGGGCCTCGAATGGGTG |
| | | TCGGGTATTGTGTACAGCGGTAGCACCTACTATGCCGCATCCGTGAAG |
| | | GGGAGATTCACCATCAGCCGGGACAACTCCAGGAACACTCTGTACCTC |
| | | CAAATGAATTCGCTGAGGCCAGAGGACACTGCCATCTACTACTGCTCC |
| | | GCGCATGGCGGAGAGTCCGACGTCTGGGGACAGGGGACCACCGTGACC |
| | | GTGTCTAGCGCGTCCGGCGGAGGCGGCAGCGGGGGTCGGGCATCAGGG |
| | | GGCGGCGGATCGGACATCCAGCTCACCCAGTCCCCGAGCTCGCTGTCC |
| | | GCCTCCGTGGGAGATCGGGTCACCATCACGTGCCGCGCCAGCCAGTCG |
| | | ATTTCCTCCTACCTGAACTGGTACCAACAGAAGCCCGGAAAAGCCCCG |
| | | AAGCTTCTCATCTACGCCGCCTCGAGCCTGCAGTCAGGAGTGCCCTCA |
| | | CGGTTCTCCGGCTCCGGTTCCGGTACTGATTTCACCCTGACCATTTCC |
| | | TCCCTGCAACCGGAGGACTTCGCTACTTACTACTGCCAGCAGTCGTAC |
| | | TCCACCCCCTACACTTTCGGACAAGGCACCAAGGTCGAAATCAAG |
| 139109-aa | 1402 | EVQLVESGGGLVQPGGSLRLSCAVSGFALSNHGMSWVRRAPGKGLEWV |
| VH | | SGIVYSGSTYYAASVKGRFTISRDNSRNTLYLQMNSLRPEDTAIYYCS |
| | | AHGGESDVWGQGTTVTVSS |
| 139109-aa | 1403 | DIQLTQSPSSLSASVGDRVTITCRASQSISSYLNWYQQKPGKAPKLLI |
| VL | | YAASSLQSGVPSRFSGSGSGTDFTLTISSLQPEDFATYYCQQSYSTPY |
| | | TFGQGTKVEIK |
| 139109-aa | 1404 | MALPVTALLLPLALLLHAARPEVQLVESGGGLVQPGGSLRLSCAVSGF |
| Full CAR | | ALSNHGMSWVRRAPGKGLEWVSGIVYSGSTYYAASVKGRFTISRDNSR |
| | | NTLYLQMNSLRPEDTAIYYCSAHGGESDVWGQGTTVTVSSASGGGGSG |
| | | GRASGGGGSDIQLTQSPSSLSASVGDRVTITCRASQSISSYLNWYQQK |
| | | PGKAPKLLIYAASSLQSGVPSRFSGSGSGTDFTLTISSLQPEDFATYY |
| | | CQQSYSTPYTFGQGTKVEIKTTTPAPRPPTPAPTIASQPLSLRPEACR |
| | | PAAGGAVHTRGLDFACDIYIWAPLAGTCGVLLLSLVITLYCKRGRKKL |
| | | LYIFKQPFMRPVQTTQEEDGCSCRFPEEEEGGCELRVKFSRSADAPAY |
| | | KQGQNQLYNELNLGRREEYDVLDKRRGRDPEMGGKPRRKNPQEGLYNE |
| | | LQKDKMAEAYSEIGMKGERRRGKGHDGLYQGLSTATKDTYDALHMQAL |
| | | PPR |
| 139109-nt | 1405 | ATGGCCCTCCCTGTCACCGCCCTGCTGCTTCCGCTGGCTCTTCTGCTC |
| Full CAR | | CACGCCGCTCGGCCCGAAGTGCAATTGGTGGAATCAGGGGGAGGACTT |
| | | GTGCAGCCTGGAGGATCGCTGAGACTGTCATGTGCCGTGTCCGGCTTT |
| | | GCCCTGTCCAACCACGGGATGTCCTGGGTCCGCCGCGCGCCTGGAAAG |
| | | GGCCTCGAATGGGTGTCGGGTATTGTGTACAGCGGTAGCACCTACTAT |
| | | GCCGCATCCGTGAAGGGGAGATTCACCATCAGCCGGGACAACTCCAGG |
| | | AACACTCTGTACCTCCAAATGAATTCGCTGAGGCCAGAGGACACTGCC |
| | | ATCTACTACTGCTCCGCGCATGGCGGAGAGTCCGACGTCTGGGGACAG |
| | | GGGACCACCGTGACCGTGTCTAGCGCGTCCGGCGGAGGCGGCAGCGGG |
| | | GGTCGGGCATCAGGGGGCGGCGGATCGGACATCCAGCTCACCCAGTCC |
| | | CCGAGCTCGCTGTCCGCCTCCGTGGGAGATCGGGTCACCATCACGTGC |
| | | CGCGCCAGCCAGTCGATTTCCTCCTACCTGAACTGGTACCAACAGAAG |
| | | CCCGGAAAAGCCCCGAAGCTTCTCATCTACGCCGCCTCGAGCCTGCAG |
| | | TCAGGAGTGCCCTCACGGTTCTCCGGCTCCGGTTCCGGTACTGATTTC |
| | | ACCCTGACCATTTCCTCCCTGCAACCGGAGGACTTCGCTACTTACTAC |
| | | TGCCAGCAGTCGTACTCCACCCCCTACACTTTCGGACAAGGCACCAAG |
| | | GTCGAAATCAAGACCACTACCCCAGCACCGAGGCCACCCACCCCGGCT |
| | | CCTACCATCGCCTCCCAGCCTCTGTCCCTGCGTCCGGAGGCATGTAGA |
| | | CCCGCAGCTGGTGGGGCCGTGCATACCCGGGGTCTTGACTTCGCCTGC |
| | | GATATCTACATTTGGGCCCCTCTGGCTGGTACTTGCGGGGTCCTGCTG |
| | | CTTTCACTCGTGATCACTCTTTACTGTAAGCGCGGTCGGAAGAAGCTG |
| | | CTGTACATCTTTAAGCAACCCTTCATGAGGCCTGTGCAGACTACTCAA |
| | | GAGGAGGACGGCTGTTCATGCCGGTTCCCAGAGGAGGAGGAAGGCGGC |
| | | TGCGAACTGCGCGTGAAATTCAGCCGCAGCGCAGATGCTCCAGCCTAC |
| | | AAGCAGGGGCAGAACCAGCTCTACAACGAACTCAATCTTGGTCGGAGA |
| | | GAGGAGTACGACGTGCTGGACAAGCGGAGAGGACGGGACCCAGAAATG |
| | | GGCGGGAAGCCGCGCAGAAAGAATCCCCAAGAGGGCCTGTACAACGAG |
| | | CTCCAAAAGGATAAGATGGCAGAAGCCTATAGCGAGATTGGTATGAAA |
| | | GGGGAACGCAGAAGAGGCAAAGGCCACGACGGACTGTACCAGGGACTC |
| | | AGCACCGCCACCAAGGACACCTATGACGCTCTTCACATGCAGGCCCTG |
| | | CCGCCTCGG |

139103

| | | |
|---|---|---|
| 139103-aa | 1406 | QVQLVESGGGLVQPGRSLRLSCAASGFTFSNYAMSWVRQAPGKGLGWV |
| ScFv | | SGISRSGENTYYADSVKGRFTISRDNSKNTLYLQMNSLRDEDTAVYYC |
| domain | | ARSPAHYYGGMDVWGQGTTVTVSSASGGGGSGGRASGGGGSDIVLTQS |
| | | PGTLSLSPGERATLSCRASQSISSSFLAWYQQKPGQAPRLLIYGASRR |
| | | ATGIPDRFSGSGSGTDFTLTISRLEPEDSAVYYCQQYHSSPSWTFGQG |
| | | TKLEIK |
| 139103-nt | 1407 | CAAGTGCAACTCGTGGAATCTGGTGGAGGACTCGTGCAACCCGGAAGA |
| ScFv | | TCGCTTAGACTGTCGTGTGCCGCCAGCGGGTTCACTTTCTCGAACTAC |
| domain | | GCGATGTCCTGGGTCCGCCAGGCACCCGGAAAGGGACTCGGTTGGGTG |
| | | TCCGGCATTTCCCGGTCCGGCGAAAATACCTACTACGCCGACTCCGTG |
| | | AAGGGCCGCTTCACCATCTCAAGGGACAACAGCAAAAACACCCTGTAC |
| | | TTGCAAATGAACTCCCTGCGGGATGAAGATACAGCCGTGTACTATTGC |
| | | GCCCGGTCGCCTGCCCATTACTACGGCGGAATGGACGTCTGGGGACAG |
| | | GGAACCACTGTGACTGTCAGCAGCGCGTCGGGTGGCGGCGGCTCAGGG |
| | | GGTCGGGCCTCCGGGGGGGGAGGGTCCGACATCGTGCTGACCCAGTCC |
| | | CCGGGAACCCTGAGCCTGAGCCCGGGAGAGCGCGCGACCCTGTCATGC |
| | | CGGGCATCCCAGAGCATTAGCTCCTCCTTTCTCGCCTGGTATCAGCAG |
| | | AAGCCCGGACAGGCCCCGAGGCTGCTGATCTACGGCGCTAGCAGAAGG |
| | | GCTACCGGAATCCCAGACCGGTTCTCCGGCTCCGGTTCCGGGACCGAT |
| | | TTCACCCTTACTATCTCGCGCCTGGAACCTGAGGACTCCGCCGTCTAC |
| | | TACTGCCAGCAGTACCACTCATCCCCGTCGTGGACGTTCGGACAGGGC |
| | | ACCAAGCTGGAGATTAAG |
| 139103-aa | 1408 | QVQLVESGGGLVQPGRSLRLSCAASGFTFSNYAMSWVRQAPGKGLGWV |
| VH | | SGISRSGENTYYADSVKGRFTISRDNSKNTLYLQMNSLRDEDTAVYYC |
| | | ARSPAHYYGGMDVWGQGTTVTVSS |
| 139103-aa | 1409 | DIVLTQSPGTLSLSPGERATLSCRASQSISSSFLAWYQQKPGQAPRLL |
| VL | | IYGASRRATGIPDRFSGSGSGTDFTLTISRLEPEDSAVYYCQQYHSSP |
| | | SWTFGQGTKLEIK |
| 139103-aa | 1410 | MALPVTALLLPLALLLHAARPQVQLVESGGGLVQPGRSLRLSCAASGF |
| Full CAR | | TFSNYAMSWVRQAPGKGLGWVSGISRSGENTYYADSVKGRFTISRDNS |
| | | KNTLYLQMNSLRDEDTAVYYCARSPAHYYGGMDVWGQGTTVTVSSASG |
| | | GGGSGGRASGGGGSDIVLTQSPGTLSLSPGERATLSCRASQSISSSFL |
| | | AWYQQKPGQAPRLLIYGASRRATGIPDRFSGSGSGTDFTLTISRLEPE |
| | | DSAVYYCQQYHSSPSWTFGQGTKLEIKTTTPAPRPPTPAPTIASQPLS |
| | | LRPEACRPAAGGAVHTRGLDFACDIYIWAPLAGTCGVLLLSLVITLYC |
| | | KRGRKKLLYIFKQPFMRPVQTTQEEDGCSCRFPEEEEGGCELRVKFSR |
| | | SADAPAYKQGQNQLYNELNLGRREEYDVLDKRRGRDPEMGGKPRRKNP |
| | | QEGLYNELQKDKMAEAYSEIGMKGERRRGKGHDGLYQGLSTATKDTYD |
| | | ALHMQALPPR |
| 139103-nt | 1411 | ATGGCCCTCCCTGTCACCGCCCTGCTGCTTCCGCTGGCTCTTCTGCTC |
| Full CAR | | CACGCCGCTCGGCCCCAAGTGCAACTCGTGGAATCTGGTGGAGGACTC |
| | | GTGCAACCCGGAAGATCGCTTAGACTGTCGTGTGCCGCCAGCGGGTTC |
| | | ACTTTCTCGAACTACGCGATGTCCTGGGTCCGCCAGGCACCCGGAAAG |
| | | GGACTCGGTTGGGTGTCCGGCATTTCCCGGTCCGGCGAAAATACCTAC |
| | | TACGCCGACTCCGTGAAGGGCCGCTTCACCATCTCAAGGGACAACAGC |
| | | AAAAACACCCTGTACTTGCAAATGAACTCCCTGCGGGATGAAGATACA |
| | | GCCGTGTACTATTGCGCCCGGTCGCCTGCCCATTACTACGGCGGAATG |
| | | GACGTCTGGGGACAGGGAACCACTGTGACTGTCAGCAGCGCGTCGGGT |
| | | GGCGGCGGCTCAGGGGGTCGGGCCTCCGGGGGGGGAGGGTCCGACATC |
| | | GTGCTGACCCAGTCCCCGGGAACCCTGAGCCTGAGCCCGGGAGAGCGC |
| | | GCGACCCTGTCATGCCGGGCATCCCAGAGCATTAGCTCCTCCTTTCTC |
| | | GCCTGGTATCAGCAGAAGCCCGGACAGGCCCCGAGGCTGCTGATCTAC |
| | | GGCGCTAGCAGAAGGGCTACCGGAATCCCAGACCGGTTCTCCGGCTCC |
| | | GGTTCCGGGACCGATTTCACCCTTACTATCTCGCGCCTGGAACCTGAG |
| | | GACTCCGCCGTCTACTACTGCCAGCAGTACCACTCATCCCCGTCGTGG |
| | | ACGTTCGGACAGGGCACCAAGCTGGAGATTAAGACCACTACCCCAGCA |
| | | CCGAGGCCACCCACCCCGGCTCCTACCATCGCCTCCCAGCCTCTGTCC |
| | | CTGCGTCCGGAGGCATGTAGACCCGCAGCTGGTGGGGCCGTGCATACC |
| | | CGGGGTCTTGACTTCGCCTGCGATATCTACATTTGGGCCCCTCTGGCT |
| | | GGTACTTGCGGGGTCCTGCTGCTTTCACTCGTGATCACTCTTTACTGT |
| | | AAGCGCGGTCGGAAGAAGCTGCTGTACATCTTTAAGCAACCCTTCATG |
| | | AGGCCTGTGCAGACTACTCAAGAGGAGGACGGCTGTTCATGCCGGTTC |
| | | CCAGAGGAGGAGGAAGGCGGCTGCGAACTGCGCGTGAAATTCAGCCGC |
| | | AGCGCAGATGCTCCAGCCTACAAGCAGGGGCAGAACCAGCTCTACAAC |
| | | GAACTCAATCTTGGTCGGAGAGAGGAGTACGACGTGCTGGACAAGCGG |
| | | AGAGGACGGGACCCAGAAATGGGCGGGAAGCCGCGCAGAAAGAATCCC |
| | | CAAGAGGGCCTGTACAACGAGCTCCAAAAGGATAAGATGGCAGAAGCC |
| | | TATAGCGAGATTGGTATGAAAGGGGAACGCAGAAGAGGCAAAGGCCAC |
| | | GACGGACTGTACCAGGGACTCAGCACCGCCACCAAGGACACCTATGAC |
| | | GCTCTTCACATGCAGGCCCTGCCGCCTCGG |

139105

| | | |
|---|---|---|
| 139105-aa | 1412 | QVQLVESGGGLVQPGRSLRLSCAASGFTFDDYAMHWVRQAPGKGLEWV |
| ScFv | | SGISWNSGSIGYADSVKGRFTISRDNAKNSLYLQMNSLRAEDTALYYC |
| domain | | SVHSFLAYWGQGTLVTVSSASGGGGSGGRASGGGGSDIVMTQTPLSLP |
| | | VTPGEPASISCRSSQSLLHSNGYNYLDWYLQKPGQSPQLLIYLGSNRA |
| | | SGVPDRFSGSGSGTDFTLKISRVEAEDVGVYYCMQALQTPYTFGQGTK |
| | | VEIK |
| 139105-nt | 1413 | CAAGTGCAACTCGTCGAATCCGGTGGAGGTCTGGTCCAACCTGGTAGA |
| ScFv | | AGCCTGAGACTGTCGTGTGCGGCCAGCGGATTCACCTTTGATGACTAT |
| domain | | GCTATGCACTGGGTGCGGCAGGCCCCAGGAAAGGGCCTGGAATGGGTG |
| | | TCGGGAATTAGCTGGAACTCCGGGTCCATTGGCTACGCCGACTCCGTG |
| | | AAGGGCCGCTTCACCATCTCCCGCGACAACGCAAAGAACTCCCTGTAC |
| | | TTGCAAATGAACTCGCTCAGGGCTGAGGATACCGCGCTGTACTACTGC |
| | | TCCGTGCATTCCTTCCTGGCCTACTGGGGACAGGGAACTCTGGTCACC |
| | | GTGTCGAGCGCCTCCGGCGGCGGGGGCTCGGGTGGACGGGCCTCGGGC |
| | | GGAGGGGGGTCCGACATCGTGATGACCCAGACCCCGCTGAGCTTGCCC |
| | | GTGACTCCCGGAGAGCCTGCATCCATCTCCTGCCGGTCATCCCAGTCC |
| | | CTTCTCCACTCCAACGGATACAACTACCTCGACTGGTACCTCCAGAAG |
| | | CCGGGACAGAGCCCTCAGCTTCTGATCTACCTGGGGTCAAATAGAGCC |
| | | TCAGGAGTGCCGGATCGGTTCAGCGGATCTGGTTCGGGAACTGATTTC |
| | | ACTCTGAAGATTTCCCGCGTGGAAGCCGAGGACGTGGGCGTCTACTAC |
| | | TGTATGCAGGCGCTGCAGACCCCCTATACCTTCGGCCAAGGGACGAAA |
| | | GTGGAGATCAAG |
| 139105-aa | 1414 | QVQLVESGGGLVQPGRSLRLSCAASGFTFDDYAMHWVRQAPGKGLEWV |
| VH | | SGISWNSGSIGYADSVKGRFTISRDNAKNSLYLQMNSLRAEDTALYYC |
| | | SVHSFLAYWGQGTLVTVSS |
| 139105-aa | 1415 | DIVMTQTPLSLPVTPGEPASISCRSSQSLLHSNGYNYLDWYLQKPGQS |
| VL | | PQLLIYLGSNRASGVPDRFSGSGSGTDFTLKISRVEAEDVGVYYCMQA |
| | | LQTPYTFGQGTKVEIK |
| 139105-aa | 1416 | MALPVTALLLPLALLLHAARPQVQLVESGGGLVQPGRSLRLSCAASGF |
| Full CAR | | TFDDYAMHWVRQAPGKGLEWVSGISWNSGSIGYADSVKGRFTISRDNA |
| | | KNSLYLQMNSLRAEDTALYYCSVHSFLAYWGQGTLVTVSSASGGGGSG |
| | | GRASGGGGSDIVMTQTPLSLPVTPGEPASISCRSSQSLLHSNGYNYLD |
| | | WYLQKPGQSPQLLIYLGSNRASGVPDRFSGSGSGTDFTLKISRVEAED |
| | | VGVYYCMQALQTPYTFGQGTKVEIKTTTPAPRPPTPAPTIASQPLSLR |
| | | PEACRPAAGGAVHTRGLDFACDIYIWAPLAGTCGVLLLSLVITLYCKR |
| | | GRKKLLYIFKQPFMRPVQTTQEEDGCSCRFPEEEEGGCELRVKFSRSA |
| | | DAPAYKQGQNQLYNELNLGRREEYDVLDKRRGRDPEMGGKPRRKNPQE |
| | | GLYNELQKDKMAEAYSEIGMKGERRRGKGHDGLYQGLSTATKDTYDAL |
| | | HMQALPPR |
| 139105-nt | 1417 | ATGGCCCTCCCTGTCACCGCCCTGCTGCTTCCGCTGGCTCTTCTGCTC |
| Full CAR | | CACGCCGCTCGGCCCCAAGTGCAACTCGTCGAATCCGGTGGAGGTCTG |
| | | GTCCAACCTGGTAGAAGCCTGAGACTGTCGTGTGCGGCCAGCGGATTC |
| | | ACCTTTGATGACTATGCTATGCACTGGGTGCGGCAGGCCCCAGGAAAG |
| | | GGCCTGGAATGGGTGTCGGGAATTAGCTGGAACTCCGGGTCCATTGGC |
| | | TACGCCGACTCCGTGAAGGGCCGCTTCACCATCTCCCGCGACAACGCA |
| | | AAGAACTCCCTGTACTTGCAAATGAACTCGCTCAGGGCTGAGGATACC |
| | | GCGCTGTACTACTGCTCCGTGCATTCCTTCCTGGCCTACTGGGGACAG |
| | | GGAACTCTGGTCACCGTGTCGAGCGCCTCCGGCGGCGGGGGCTCGGGT |
| | | GGACGGGCCTCGGGCGGAGGGGGGTCCGACATCGTGATGACCCAGACC |
| | | CCGCTGAGCTTGCCCGTGACTCCCGGAGAGCCTGCATCCATCTCCTGC |
| | | CGGTCATCCCAGTCCCTTCTCCACTCCAACGGATACAACTACCTCGAC |
| | | TGGTACCTCCAGAAGCCGGGACAGAGCCCTCAGCTTCTGATCTACCTG |
| | | GGGTCAAATAGAGCCTCAGGAGTGCCGGATCGGTTCAGCGGATCTGGT |
| | | TCGGGAACTGATTTCACTCTGAAGATTTCCCGCGTGGAAGCCGAGGAC |
| | | GTGGGCGTCTACTACTGTATGCAGGCGCTGCAGACCCCCTATACCTTC |
| | | GGCCAAGGGACGAAAGTGGAGATCAAGACCACTACCCCAGCACCGAGG |
| | | CCACCCACCCCGGCTCCTACCATCGCCTCCCAGCCTCTGTCCCTGCGT |
| | | CCGGAGGCATGTAGACCCGCAGCTGGTGGGGCCGTGCATACCCGGGGT |
| | | CTTGACTTCGCCTGCGATATCTACATTTGGGCCCCTCTGGCTGGTACT |
| | | TGCGGGGTCCTGCTGCTTTCACTCGTGATCACTCTTTACTGTAAGCGC |
| | | GGTCGGAAGAAGCTGCTGTACATCTTTAAGCAACCCTTCATGAGGCCT |
| | | GTGCAGACTACTCAAGAGGAGGACGGCTGTTCATGCCGGTTCCCAGAG |
| | | GAGGAGGAAGGCGGCTGCGAACTGCGCGTGAAATTCAGCCGCAGCGCA |
| | | GATGCTCCAGCCTACAAGCAGGGGCAGAACCAGCTCTACAACGAACTC |
| | | AATCTTGGTCGGAGAGAGGAGTACGACGTGCTGGACAAGCGGAGAGGA |
| | | CGGGACCCAGAAATGGGCGGGAAGCCGCGCAGAAAGAATCCCCAAGAG |
| | | GGCCTGTACAACGAGCTCCAAAAGGATAAGATGGCAGAAGCCTATAGC |
| | | GAGATTGGTATGAAAGGGGAACGCAGAAGAGGCAAAGGCCACGACGGA |
| | | CTGTACCAGGGACTCAGCACCGCCACCAAGGACACCTATGACGCTCTT |
| | | CACATGCAGGCCCTGCCGCCTCGG |

139111

| | | |
|---|---|---|
| 139111-aa | 1418 | EVQLLESGGGLVQPGGSLRLSCAVSGFALSNHGMSWVRRAPGKGLEWV |
| ScFv | | SGIVYSGSTYYAASVKGRFTISRDNSRNTLYLQMNSLRPEDTAIYYCS |
| domain | | AHGGESDVWGQGTTVTVSSASGGGGSGGRASGGGGSDIVMTQTPLSLS |
| | | VTPGQPASISCKSSQSLLRNDGKTPLYWYLQKAGQPPQLLIYEVSNRF |
| | | SGVPDRFSGSGSGTDFTLKISRVEAEDVGAYYCMQNIQFPSFGGGTKL |
| | | EIK |
| 139111-nt | 1419 | GAAGTGCAATTGTTGGAATCTGGAGGAGGACTTGTGCAGCCTGGAGGA |
| ScFv | | TCACTGAGACTTTCGTGTGCGGTGTCAGGCTTCGCCCTGAGCAACCAC |
| domain | | GGCATGAGCTGGGTGCGGAGAGCCCCGGGGAAGGGTCTGGAATGGGTG |
| | | TCCGGGATCGTCTACTCCGGTTCAACTTACTACGCCGCAAGCGTGAAG |
| | | GGTCGCTTCACCATTTCCCGCGATAACTCCCGGAACACCCTGTACCTC |
| | | CAAATGAACTCCCTGCGGCCCGAGGACACCGCCATCTACTACTGTTCC |
| | | GCGCATGGAGGAGAGTCCGATGTCTGGGGACAGGGCACTACCGTGACC |
| | | GTGTCGAGCGCCTCGGGGGGAGGAGGCTCCGGCGGTCGCGCCTCCGGG |
| | | GGGGGTGGCAGCGACATTGTGATGACGCAGACTCCACTCTCGCTGTCC |
| | | GTGACCCCGGGACAGCCCGCGTCCATCTCGTGCAAGAGCTCCCAGAGC |
| | | CTGCTGAGGAACGACGGAAAGACTCCTCTGTATTGGTACCTCCAGAAG |
| | | GCTGGACAGCCCCCGCAACTGCTCATCTACGAAGTGTCAAATCGCTTC |
| | | TCCGGGGTGCCGGATCGGTTTTCCGGCTCGGGATCGGGCACCGACTTC |
| | | ACCCTGAAAATCTCCAGGGTCGAGGCCGAGGACGTGGGAGCCTACTAC |
| | | TGCATGCAAAACATCCAGTTCCCTTCCTTCGGCGGCGGCACAAAGCTG |
| | | GAGATTAAG |
| 139111-aa | 1420 | EVQLLESGGGLVQPGGSLRLSCAVSGFALSNHGMSWVRRAPGKGLEWV |
| VH | | SGIVYSGSTYYAASVKGRFTISRDNSRNTLYLQMNSLRPEDTAIYYCS |
| | | AHGGESDVWGQGTTVTVSS |
| 139111-aa | 1421 | DIVMTQTPLSLSVTPGQPASISCKSSQSLLRNDGKTPLYWYLQKAGQP |
| VL | | PQLLIYEVSNRFSGVPDRFSGSGSGTDFTLKISRVEAEDVGAYYCMQN |
| | | IQFPSFGGGTKLEIK |
| 139111-aa | 1422 | MALPVTALLLPLALLLHAARPEVQLLESGGGLVQPGGSLRLSCAVSGF |
| Full CAR | | ALSNHGMSWVRRAPGKGLEWVSGIVYSGSTYYAASVKGRFTISRDNSR |
| | | NTLYLQMNSLRPEDTAIYYCSAHGGESDVWGQGTTVTVSSASGGGGSG |
| | | GRASGGGGSDIVMTQTPLSLSVTPGQPASISCKSSQSLLRNDGKTPLY |
| | | WYLQKAGQPPQLLIYEVSNRFSGVPDRFSGSGSGTDFTLKISRVEAED |
| | | VGAYYCMQNIQFPSFGGGTKLEIKTTTPAPRPPTPAPTIASQPLSLRP |
| | | EACRPAAGGAVHTRGLDFACDIYIWAPLAGTCGVLLLSLVITLYCKRG |
| | | RKKLLYIFKQPFMRPVQTTQEEDGCSCREPEEEEGGCELRVKFSRSAD |
| | | APAYKQGQNQLYNELNLGRREEYDVLDKRRGRDPEMGGKPRRKNPQEG |
| | | LYNELQKDKMAEAYSEIGMKGERRRGKGHDGLYQGLSTATKDTYDALH |
| | | MQALPPR |
| 139111-nt | 1423 | ATGGCCCTCCCTGTCACCGCCCTGCTGCTTCCGCTGGCTCTTCTGCTC |
| Full CAR | | CACGCCGCTCGGCCCGAAGTGCAATTGTTGGAATCTGGAGGAGGACTT |
| | | GTGCAGCCTGGAGGATCACTGAGACTTTCGTGTGCGGTGTCAGGCTTC |
| | | GCCCTGAGCAACCACGGCATGAGCTGGGTGCGGAGAGCCCCGGGGAAG |
| | | GGTCTGGAATGGGTGTCCGGGATCGTCTACTCCGGTTCAACTTACTAC |
| | | GCCGCAAGCGTGAAGGGTCGCTTCACCATTTCCCGCGATAACTCCCGG |
| | | AACACCCTGTACCTCCAAATGAACTCCCTGCGGCCCGAGGACACCGCC |
| | | ATCTACTACTGTTCCGCGCATGGAGGAGAGTCCGATGTCTGGGGACAG |
| | | GGCACTACCGTGACCGTGTCGAGCGCCTCGGGGGGAGGAGGCTCCGGC |
| | | GGTCGCGCCTCCGGGGGGGGTGGCAGCGACATTGTGATGACGCAGACT |
| | | CCACTCTCGCTGTCCGTGACCCCGGGACAGCCCGCGTCCATCTCGTGC |
| | | AAGAGCTCCCAGAGCCTGCTGAGGAACGACGGAAAGACTCCTCTGTAT |
| | | TGGTACCTCCAGAAGGCTGGACAGCCCCCGCAACTGCTCATCTACGAA |
| | | GTGTCAAATCGCTTCTCCGGGGTGCCGGATCGGTTTTCCGGCTCGGGA |
| | | TCGGGCACCGACTTCACCCTGAAAATCTCCAGGGTCGAGGCCGAGGAC |
| | | GTGGGAGCCTACTACTGCATGCAAAACATCCAGTTCCCTTCCTTCGGC |
| | | GGCGGCACAAAGCTGGAGATTAAGACCACTACCCCAGCACCGAGGCCA |
| | | CCCACCCCGGCTCCTACCATCGCCTCCCAGCCTCTGTCCCTGCGTCCG |
| | | GAGGCATGTAGACCCGCAGCTGGTGGGGCCGTGCATACCCGGGGTCTT |
| | | GACTTCGCCTGCGATATCTACATTTGGGCCCCTCTGGCTGGTACTTGC |
| | | GGGGTCCTGCTGCTTTCACTCGTGATCACTCTTTACTGTAAGCGCGGT |
| | | CGGAAGAAGCTGCTGTACATCTTTAAGCAACCCTTCATGAGGCCTGTG |
| | | CAGACTACTCAAGAGGAGGACGGCTGTTCATGCCGGTTCCCAGAGGAG |
| | | GAGGAAGGCGGCTGCGAACTGCGCGTGAAATTCAGCCGCAGCGCAGAT |
| | | GCTCCAGCCTACAAGCAGGGGCAGAACCAGCTCTACAACGAACTCAAT |
| | | CTTGGTCGGAGAGAGGAGTACGACGTGCTGGACAAGCGGAGAGGACGG |
| | | GACCCAGAAATGGGCGGGAAGCCGCGCAGAAAGAATCCCCAAGAGGGC |
| | | CTGTACAACGAGCTCCAAAAGGATAAGATGGCAGAAGCCTATAGCGAG |
| | | ATTGGTATGAAAGGGGAACGCAGAAGAGGCAAAGGCCACGACGGACTG |
| | | TACCAGGGACTCAGCACCGCCACCAAGGACACCTATGACGCTCTTCAC |
| | | ATGCAGGCCCTGCCGCCTCGG |

139100

| | | |
|---|---|---|
| 139100-aa | 1424 | QVQLVQSGAEVRKTGASVKVSCKASGYIFDNFGINWVRQAPGQGLEWM |
| ScFv | | GWINPKNNNTNYAQKFQGRVTITADESTNTAYMEVSSLRSEDTAVYYC |
| domain | | ARGPYYYQSYMDVWGQGTMVTVSSASGGGGSGGRASGGGGSDIVMTQT |
| | | PLSLPVTPGEPASISCRSSQSLLHSNGYNYLNWYLQKPGQSPQLLIYL |
| | | GSKRASGVPDRFSGSGSGTDFTLHITRVGAEDVGVYYCMQALQTPYTF |
| | | GQGTKLEIK |
| 139100-nt | 1425 | CAAGTCCAACTCGTCCAGTCCGGCGCAGAAGTCAGAAAAACCGGTGCT |
| ScFv | | AGCGTGAAAGTGTCCTGCAAGGCCTCCGGCTACATTTTCGATAACTTC |
| domain | | GGAATCAACTGGGTCAGACAGGCCCCGGGCCAGGGGCTGGAATGGATG |
| | | GGATGGATCAACCCCAAGAACAACAACACCAACTACGCACAGAAGTTC |
| | | CAGGGCCGCGTGACTATCACCGCCGATGAATCGACCAATACCGCCTAC |
| | | ATGGAGGTGTCCTCCCTGCGGTCGGAGGACACTGCCGTGTATTACTGC |
| | | GCGAGGGGCCCATACTACTACCAAAGCTACATGGACGTCTGGGGACAG |
| | | GGAACCATGGTGACCGTGTCATCCGCCTCCGGTGGTGGAGGCTCCGGG |
| | | GGGCGGGCTTCAGGAGGCGGAGGAAGCGATATTGTGATGACCCAGACT |
| | | CCGCTTAGCCTGCCCGTGACTCCTGGAGAACCGGCCTCCATTTCCTGC |
| | | CGGTCCTCGCAATCACTCCTGCATTCCAACGGTTACAACTACCTGAAT |
| | | TGGTACCTCCAGAAGCCTGGCCAGTCGCCCCAGTTGCTGATCTATCTG |
| | | GGCTCGAAGCGCGCCTCCGGGGTGCCTGACCGGTTTAGCGGATCTGGG |
| | | AGCGGCACGGACTTCACTCTCCACATCACCCGCGTGGGAGCGGAGGAC |
| | | GTGGGAGTGTACTACTGTATGCAGGCGCTGCAGACTCCGTACACATTC |
| | | GGACAGGGCACCAAGCTGGAGATCAAG |
| 139100-aa | 1426 | QVQLVQSGAEVRKTGASVKVSCKASGYIFDNFGINWVRQAPGQGLEWM |
| VH | | GWINPKNNNTNYAQKFQGRVTITADESTNTAYMEVSSLRSEDTAVYYC |
| | | ARGPYYYQSYMDVWGQGTMVTVSS |
| 139100-aa | 1427 | DIVMTQTPLSLPVTPGEPASISCRSSQSLLHSNGYNYLNWYLQKPGQS |
| VL | | PQLLIYLGSKRASGVPDRFSGSGSGTDFTLHITRVGAEDVGVYYCMQA |
| | | LQTPYTFGQGTKLEIK |
| 139100-aa | 1428 | MALPVTALLLPLALLLHAARPQVQLVQSGAEVRKTGASVKVSCKASGY |
| Full CAR | | IFDNFGINWVRQAPGQGLEWMGWINPKNNNTNYAQKFQGRVTITADES |
| | | TNTAYMEVSSLRSEDTAVYYCARGPYYYQSYMDVWGQGTMVTVSSASG |
| | | GGGSGGRASGGGGSDIVMTQTPLSLPVTPGEPASISCRSSQSLLHSNG |
| | | YNYLNWYLQKPGQSPQLLIYLGSKRASGVPDRFSGSGSGTDFTLHITR |
| | | VGAEDVGVYYCMQALQTPYTFGQGTKLEIKTTTPAPRPPTPAPTIASQ |
| | | PLSLRPEACRPAAGGAVHTRGLDFACDIYIWAPLAGTCGVLLLSLVIT |
| | | LYCKRGRKKLLYIFKQPFMRPVQTTQEEDGCSCRFPEEEEGGCELRVK |
| | | FSRSADAPAYKQGQNQLYNELNLGRREEYDVLDKRRGRDPEMGGKPRR |
| | | KNPQEGLYNELQKDKMAEAYSEIGMKGERRRGKGHDGLYQGLSTATKD |
| | | TYDALHMQALPPR |
| 139100-nt | 1429 | ATGGCCCTCCCTGTCACCGCCCTGCTGCTTCCGCTGGCTCTTCTGCTC |
| Full CAR | | CACGCCGCTCGGCCCCAAGTCCAACTCGTCCAGTCCGGCGCAGAAGTC |
| | | AGAAAAACCGGTGCTAGCGTGAAAGTGTCCTGCAAGGCCTCCGGCTAC |
| | | ATTTTCGATAACTTCGGAATCAACTGGGTCAGACAGGCCCCGGGCCAG |
| | | GGGCTGGAATGGATGGGATGGATCAACCCCAAGAACAACAACACCAAC |
| | | TACGCACAGAAGTTCCAGGGCCGCGTGACTATCACCGCCGATGAATCG |
| | | ACCAATACCGCCTACATGGAGGTGTCCTCCCTGCGGTCGGAGGACACT |
| | | GCCGTGTATTACTGCGCGAGGGGCCCATACTACTACCAAAGCTACATG |
| | | GACGTCTGGGGACAGGGAACCATGGTGACCGTGTCATCCGCCTCCGGT |
| | | GGTGGAGGCTCCGGGGGGCGGGCTTCAGGAGGCGGAGGAAGCGATATT |
| | | GTGATGACCCAGACTCCGCTTAGCCTGCCCGTGACTCCTGGAGAACCG |
| | | GCCTCCATTTCCTGCCGGTCCTCGCAATCACTCCTGCATTCCAACGGT |
| | | TACAACTACCTGAATTGGTACCTCCAGAAGCCTGGCCAGTCGCCCCAG |
| | | TTGCTGATCTATCTGGGCTCGAAGCGCGCCTCCGGGGTGCCTGACCGG |
| | | TTTAGCGGATCTGGGAGCGGCACGGACTTCACTCTCCACATCACCCGC |
| | | GTGGGAGCGGAGGACGTGGGAGTGTACTACTGTATGCAGGCGCTGCAG |
| | | ACTCCGTACACATTCGGACAGGGCACCAAGCTGGAGATCAAGACCACT |
| | | ACCCCAGCACCGAGGCCACCCACCCCGGCTCCTACCATCGCCTCCCAG |
| | | CCTCTGTCCCTGCGTCCGGAGGCATGTAGACCCGCAGCTGGTGGGGCC |
| | | GTGCATACCCGGGGTCTTGACTTCGCCTGCGATATCTACATTTGGGCC |
| | | CCTCTGGCTGGTACTTGCGGGGTCCTGCTGCTTTCACTCGTGATCACT |
| | | CTTTACTGTAAGCGCGGTCGGAAGAAGCTGCTGTACATCTTTAAGCAA |
| | | CCCTTCATGAGGCCTGTGCAGACTACTCAAGAGGAGGACGGCTGTTCA |
| | | TGCCGGTTCCCAGAGGAGGAGGAAGGCGGCTGCGAACTGCGCGTGAAA |
| | | TTCAGCCGCAGCGCAGATGCTCCAGCCTACAAGCAGGGGCAGAACCAG |
| | | CTCTACAACGAACTCAATCTTGGTCGGAGAGAGGAGTACGACGTGCTG |
| | | GACAAGCGGAGAGGACGGGACCCAGAAATGGGCGGGAAGCCGCGCAGA |
| | | AAGAATCCCCAAGAGGGCCTGTACAACGAGCTCCAAAAGGATAAGATG |
| | | GCAGAAGCCTATAGCGAGATTGGTATGAAAGGGGAACGCAGAAGAGGC |
| | | AAAGGCCACGACGGACTGTACCAGGGACTCAGCACCGCCACCAAGGAC |
| | | ACCTATGACGCTCTTCACATGCAGGCCCTGCCGCCTCGG |

139101

| | | |
|---|---|---|
| 139101-aa | 1430 | QVQLQESGGGLVQPGGSLRLSCAASGFTFSSDAMTWVRQAPGKGLEWV |
| ScFv | | SVISGSGGTTYYADSVKGRFTISRDNSKNTLYLQMNSLRAEDTAVYYC |
| domain | | AKLDSSGYYYARGPRYWGQGTLVTVSSASGGGGSGGRASGGGGSDIQL |
| | | TQSPSSLSASVGDRVTITCRASQSISSYLNWYQQKPGKAPKLLIYGAS |
| | | TLASGVPARFSGSGSGTHFTLTINSLQSEDSATYYCQQSYKRASFGQG |
| | | TKVEIK |
| 139101-nt | 1431 | CAAGTGCAACTTCAAGAATCAGGCGGAGGACTCGTGCAGCCCGGAGGA |
| ScFv | | TCATTGCGGCTCTCGTGCGCCGCCTCGGGCTTCACCTTCTCGAGCGAC |
| domain | | GCCATGACCTGGGTCCGCCAGGCCCCGGGGAAGGGGCTGGAATGGGTG |
| | | TCTGTGATTTCCGGCTCCGGGGGAACTACGTACTACGCCGATTCCGTG |
| | | AAAGGTCGCTTCACTATCTCCCGGGACAACAGCAAGAACACCCTTTAT |
| | | CTGCAAATGAATTCCCTCCGCGCCGAGGACACCGCCGTGTACTACTGC |
| | | GCCAAGCTGGACTCCTCGGGCTACTACTATGCCCGGGGTCCGAGATAC |
| | | TGGGGACAGGGAACCCTCGTGACCGTGTCCTCCGCGTCCGGCGGAGGA |
| | | GGGTCGGGAGGGCGGGCCTCCGGCGGCGGCGGTTCGGACATCCAGCTG |
| | | ACCCAGTCCCCATCCTCACTGAGCGCAAGCGTGGGCGACAGAGTCACC |
| | | ATTACATGCAGGGCGTCCCAGAGCATCAGCTCCTACCTGAACTGGTAC |
| | | CAACAGAAGCCTGGAAAGGCTCCTAAGCTGTTGATCTACGGGGCTTCG |
| | | ACCCTGGCATCCGGGGTGCCCGCGAGGTTTAGCGGAAGCGGTAGCGGC |
| | | ACTCACTTCACTCTGACCATTAACAGCCTCCAGTCCGAGGATTCAGCC |
| | | ACTTACTACTGTCAGCAGTCCTACAAGCGGGCCAGCTTCGGACAGGGC |
| | | ACTAAGGTCGAGATCAAG |
| 139101-aa | 1432 | QVQLQESGGGLVQPGGSLRLSCAASGFTFSSDAMTWVRQAPGKGLEWV |
| VH | | SVISGSGGTTYYADSVKGRFTISRDNSKNTLYLQMNSLRAEDTAVYYC |
| | | AKLDSSGYYYARGPRYWGQGTLVTVSS |
| 139101-aa | 1433 | DIQLTQSPSSLSASVGDRVTITCRASQSISSYLNWYQQKPGKAPKLLI |
| VL | | YGASTLASGVPARFSGSGSGTHFTLTINSLQSEDSATYYCQQSYKRAS |
| | | FGQGTKVEIK |
| 139101-aa | 1434 | MALPVTALLLPLALLLHAARPQVQLQESGGGLVQPGGSLRLSCAASGF |
| Full CAR | | TFSSDAMTWVRQAPGKGLEWVSVISGSGGTTYYADSVKGRFTISRDNS |
| | | KNTLYLQMNSLRAEDTAVYYCAKLDSSGYYYARGPRYWGQGTLVTVSS |
| | | ASGGGGSGGRASGGGGSDIQLTQSPSSLSASVGDRVTITCRASQSISS |
| | | YLNWYQQKPGKAPKLLIYGASTLASGVPARFSGSGSGTHFTLTINSLQ |
| | | SEDSATYYCQQSYKRASFGQGTKVEIKTTTPAPRPPTPAPTIASQPLS |
| | | LRPEACRPAAGGAVHTRGLDFACDIYIWAPLAGTCGVLLLSLVITLYC |
| | | KRGRKKLLYIFKQPFMRPVQTTQEEDGCSCRFPEEEEGGCELRVKFSR |
| | | SADAPAYKQGQNQLYNELNLGRREEYDVLDKRRGRDPEMGGKPRRKNP |
| | | QEGLYNELQKDKMAEAYSEIGMKGERRRGKGHDGLYQGLSTATKDTYD |
| | | ALHMQALPPR |
| 139101-nt | 1435 | ATGGCCCTCCCTGTCACCGCCCTGCTGCTTCCGCTGGCTCTTCTGCTC |
| Full CAR | | CACGCCGCTCGGCCCCAAGTGCAACTTCAAGAATCAGGCGGAGGACTC |
| | | GTGCAGCCCGGAGGATCATTGCGGCTCTCGTGCGCCGCCTCGGGCTTC |
| | | ACCTTCTCGAGCGACGCCATGACCTGGGTCCGCCAGGCCCCGGGGAAG |
| | | GGGCTGGAATGGGTGTCTGTGATTTCCGGCTCCGGGGGAACTACGTAC |
| | | TACGCCGATTCCGTGAAAGGTCGCTTCACTATCTCCCGGGACAACAGC |
| | | AAGAACACCCTTTATCTGCAAATGAATTCCCTCCGCGCCGAGGACACC |
| | | GCCGTGTACTACTGCGCCAAGCTGGACTCCTCGGGCTACTACTATGCC |
| | | CGGGGTCCGAGATACTGGGGACAGGGAACCCTCGTGACCGTGTCCTCC |
| | | GCGTCCGGCGGAGGAGGGTCGGGAGGGCGGGCCTCCGGCGGCGGCGGT |
| | | TCGGACATCCAGCTGACCCAGTCCCCATCCTCACTGAGCGCAAGCGTG |
| | | GGCGACAGAGTCACCATTACATGCAGGGCGTCCCAGAGCATCAGCTCC |
| | | TACCTGAACTGGTACCAACAGAAGCCTGGAAAGGCTCCTAAGCTGTTG |
| | | ATCTACGGGGCTTCGACCCTGGCATCCGGGGTGCCCGCGAGGTTTAGC |
| | | GGAAGCGGTAGCGGCACTCACTTCACTCTGACCATTAACAGCCTCCAG |
| | | TCCGAGGATTCAGCCACTTACTACTGTCAGCAGTCCTACAAGCGGGCC |
| | | AGCTTCGGACAGGGCACTAAGGTCGAGATCAAGACCACTACCCCAGCA |
| | | CCGAGGCCACCCACCCCGGCTCCTACCATCGCCTCCCAGCCTCTGTCC |
| | | CTGCGTCCGGAGGCATGTAGACCCGCAGCTGGTGGGGCCGTGCATACC |
| | | CGGGGTCTTGACTTCGCCTGCGATATCTACATTTGGGCCCCTCTGGCT |
| | | GGTACTTGCGGGGTCCTGCTGCTTTCACTCGTGATCACTCTTTACTGT |
| | | AAGCGCGGTCGGAAGAAGCTGCTGTACATCTTTAAGCAACCCTTCATG |
| | | AGGCCTGTGCAGACTACTCAAGAGGAGGACGGCTGTTCATGCCGGTTC |
| | | CCAGAGGAGGAGGAAGGCGGCTGCGAACTGCGCGTGAAATTCAGCCGC |
| | | AGCGCAGATGCTCCAGCCTACAAGCAGGGGCAGAACCAGCTCTACAAC |
| | | GAACTCAATCTTGGTCGGAGAGAGGAGTACGACGTGCTGGACAAGCGG |
| | | AGAGGACGGGACCCAGAAATGGGCGGGAAGCCGCGCAGAAAGAATCCC |
| | | CAAGAGGGCCTGTACAACGAGCTCCAAAAGGATAAGATGGCAGAAGCC |
| | | TATAGCGAGATTGGTATGAAAGGGGAACGCAGAAGAGGCAAAGGCCAC |
| | | GACGGACTGTACCAGGGACTCAGCACCGCCACCAAGGACACCTATGAC |
| | | GCTCTTCACATGCAGGCCCTGCCGCCTCGG |

139102

| | | |
|---|---|---|
| 139102-aa | 1436 | QVQLVQSGAEVKKPGASVKVSCKASGYTFSNYGITWVRQAPGQGLEWM |
| ScFv | | GWISAYNGNTNYAQKFQGRVTMTRNTSISTAYMELSSLRSEDTAVYYC |
| domain | | ARGPYYYYMDVWGKGTMVTVSSASGGGGSGGRASGGGGSEIVMTQSPL |
| | | SLPVTPGEPASISCRSSQSLLYSNGYNYVDWYLQKPGQSPQLLIYLGS |
| | | NRASGVPDRFSGSGSGTDFKLQISRVEAEDVGIYYCMQGRQFPYSFGQ |
| | | GTKVEIK |
| 139102-nt | 1437 | CAAGTCCAACTGGTCCAGAGCGGTGCAGAAGTGAAGAAGCCCGGAGCG |
| ScFv | | AGCGTGAAAGTGTCCTGCAAGGCTTCCGGGTACACCTTCTCCAACTAC |
| domain | | GGCATCACTTGGGTGCGCCAGGCCCCGGGACAGGGCCTGGAATGGATG |
| | | GGGTGGATTTCCGCGTACAACGGCAATACGAACTACGCTCAGAAGTTC |
| | | CAGGGTAGAGTGACCATGACTAGGAACACCTCCATTTCCACCGCCTAC |
| | | ATGGAACTGTCCTCCCTGCGGAGCGAGGACACCGCCGTGTACTATTGC |
| | | GCCCGGGGACCATACTACTACTACATGGATGTCTGGGGGAAGGGGACT |
| | | ATGGTCACCGTGTCATCCGCCTCGGGAGGCGGCGGATCAGGAGGACGC |
| | | GCCTCTGGTGGTGGAGGATCGGAGATCGTGATGACCCAGAGCCCTCTC |
| | | TCCTTGCCCGTGACTCCTGGGGAGCCCGCATCCATTTCATGCCGGAGC |
| | | TCCCAGTCACTTCTCTACTCCAACGGCTATAACTACGTGGATTGGTAC |
| | | CTCCAAAAGCCGGGCCAGAGCCCGCAGCTGCTGATCTACCTGGGCTCG |
| | | AACAGGGCCAGCGGAGTGCCTGACCGGTTCTCCGGGTCGGGAAGCGGG |
| | | ACCGACTTCAAGCTGCAAATCTCGAGAGTGGAGGCCGAGGACGTGGGA |
| | | ATCTACTACTGTATGCAGGGCCGCCAGTTTCCGTACTCGTTCGGACAG |
| | | GGCACCAAAGTGGAAATCAAG |
| 139102-aa | 1438 | QVQLVQSGAEVKKPGASVKVSCKASGYTFSNYGITWVRQAPGQGLEWM |
| VH | | GWISAYNGNTNYAQKFQGRVTMTRNTSISTAYMELSSLRSEDTAVYYC |
| | | ARGPYYYYMDVWGKGTMVTVSS |
| 139102-aa | 1439 | EIVMTQSPLSLPVTPGEPASISCRSSQSLLYSNGYNYVDWYLQKPGQS |
| VL | | PQLLIYLGSNRASGVPDRFSGSGSGTDFKLQISRVEAEDVGIYYCMQG |
| | | RQFPYSFGQGTKVEIK |
| 139102-aa | 1440 | MALPVTALLLPLALLLHAARPQVQLVQSGAEVKKPGASVKVSCKASGY |
| Full CAR | | TFSNYGITWVRQAPGQGLEWMGWISAYNGNTNYAQKFQGRVTMTRNTS |
| | | ISTAYMELSSLRSEDTAVYYCARGPYYYYMDVWGKGTMVTVSSASGGG |
| | | GSGGRASGGGGSEIVMTQSPLSLPVTPGEPASISCRSSQSLLYSNGYN |
| | | YVDWYLQKPGQSPQLLIYLGSNRASGVPDRFSGSGSGTDFKLQISRVE |
| | | AEDVGIYYCMQGRQFPYSFGQGTKVEIKTTTPAPRPPTPAPTIASQPL |
| | | SLRPEACRPAAGGAVHTRGLDFACDIYIWAPLAGTCGVLLLSLVITLY |
| | | CKRGRKKLLYIFKQPFMRPVQTTQEEDGCSCRFPEEEEGGCELRVKFS |
| | | RSADAPAYKQGQNQLYNELNLGRREEYDVLDKRRGRDPEMGGKPRRKN |
| | | PQEGLYNELQKDKMAEAYSEIGMKGERRRGKGHDGLYQGLSTATKDTY |
| | | DALHMQALPPR |
| 139102-nt | 1441 | ATGGCCCTCCCTGTCACCGCCCTGCTGCTTCCGCTGGCTCTTCTGCTC |
| Full CAR | | CACGCCGCTCGGCCCCAAGTCCAACTGGTCCAGAGCGGTGCAGAAGTG |
| | | AAGAAGCCCGGAGCGAGCGTGAAAGTGTCCTGCAAGGCTTCCGGGTAC |
| | | ACCTTCTCCAACTACGGCATCACTTGGGTGCGCCAGGCCCCGGGACAG |
| | | GGCCTGGAATGGATGGGGTGGATTTCCGCGTACAACGGCAATACGAAC |
| | | TACGCTCAGAAGTTCCAGGGTAGAGTGACCATGACTAGGAACACCTCC |
| | | ATTTCCACCGCCTACATGGAACTGTCCTCCCTGCGGAGCGAGGACACC |
| | | GCCGTGTACTATTGCGCCCGGGGACCATACTACTACTACATGGATGTC |
| | | TGGGGGAAGGGGACTATGGTCACCGTGTCATCCGCCTCGGGAGGCGGC |
| | | GGATCAGGAGGACGCGCCTCTGGTGGTGGAGGATCGGAGATCGTGATG |
| | | ACCCAGAGCCCTCTCTCCTTGCCCGTGACTCCTGGGGAGCCCGCATCC |
| | | ATTTCATGCCGGAGCTCCCAGTCACTTCTCTACTCCAACGGCTATAAC |
| | | TACGTGGATTGGTACCTCCAAAAGCCGGGCCAGAGCCCGCAGCTGCTG |
| | | ATCTACCTGGGCTCGAACAGGGCCAGCGGAGTGCCTGACCGGTTCTCC |
| | | GGGTCGGGAAGCGGGACCGACTTCAAGCTGCAAATCTCGAGAGTGGAG |
| | | GCCGAGGACGTGGGAATCTACTACTGTATGCAGGGCCGCCAGTTTCCG |
| | | TACTCGTTCGGACAGGGCACCAAAGTGGAAATCAAGACCACTACCCCA |
| | | GCACCGAGGCCACCCACCCCGGCTCCTACCATCGCCTCCCAGCCTCTG |
| | | TCCCTGCGTCCGGAGGCATGTAGACCCGCAGCTGGTGGGGCCGTGCAT |
| | | ACCCGGGGTCTTGACTTCGCCTGCGATATCTACATTTGGGCCCCTCTG |
| | | GCTGGTACTTGCGGGGTCCTGCTGCTTTCACTCGTGATCACTCTTTAC |
| | | TGTAAGCGCGGTCGGAAGAAGCTGCTGTACATCTTTAAGCAACCCTTC |
| | | ATGAGGCCTGTGCAGACTACTCAAGAGGAGGACGGCTGTTCATGCCGG |
| | | TTCCCAGAGGAGGAGGAAGGCGGCTGCGAACTGCGCGTGAAATTCAGC |
| | | CGCAGCGCAGATGCTCCAGCCTACAAGCAGGGGCAGAACCAGCTCTAC |
| | | AACGAACTCAATCTTGGTCGGAGAGAGGAGTACGACGTGCTGGACAAG |
| | | CGGAGAGGACGGGACCCAGAAATGGGCGGGAAGCCGCGCAGAAAGAAT |
| | | CCCCAAGAGGGCCTGTACAACGAGCTCCAAAAGGATAAGATGGCAGAA |
| | | GCCTATAGCGAGATTGGTATGAAAGGGGAACGCAGAAGAGGCAAAGGC |
| | | CACGACGGACTGTACCAGGGACTCAGCACCGCCACCAAGGACACCTAT |
| | | GACGCTCTTCACATGCAGGCCCTGCCGCCTCGG |

139104

| | | |
|---|---|---|
| 139104-aa | 1442 | EVQLLETGGGLVQPGGSLRLSCAVSGFALSNHGMSWVRRAPGKGLEWV |
| ScFv | | SGIVYSGSTYYAASVKGRFTISRDNSRNTLYLQMNSLRPEDTAIYYCS |
| domain | | AHGGESDVWGQGTTVTVSSASGGGGSGGRASGGGGSEIVLTQSPATLS |
| | | VSPGESATLSCRASQSVSSNLAWYQQKPGQAPRLLIYGASTRASGIPD |
| | | RFSGSGSGTDFTLTISSLQAEDVAVYYCQQYGSSLTFGGGTKVEIK |
| 139104-nt | 1443 | GAAGTGCAATTGCTCGAAACTGGAGGAGGTCTGGTGCAACCTGGAGGA |
| ScFv | | TCACTTCGCCTGTCCTGCGCCGTGTCGGGCTTTGCCCTGTCCAACCAT |
| domain | | GGAATGAGCTGGGTCCGCCGCGCGCCGGGGAAGGGCCTCGAATGGGTG |
| | | TCCGGCATCGTCTACTCCGGCTCCACCTACTACGCCGCGTCCGTGAAG |
| | | GGCCGGTTCACGATTTCACGGGACAACTCGCGGAACACCCTGTACCTC |
| | | CAAATGAATTCCCTTCGGCCGGAGGATACTGCCATCTACTACTGCTCC |
| | | GCCCACGGTGGCGAATCCGACGTCTGGGGCCAGGGAACCACCGTGACC |
| | | GTGTCCAGCGCGTCCGGGGGAGGAGGAAGCGGGGGTAGAGCATCGGGT |
| | | GGAGGCGGATCAGAGATCGTGCTGACCCAGTCCCCCGCCACCTTGAGC |
| | | GTGTCACCAGGAGAGTCCGCCACCCTGTCATGCCGCGCCAGCCAGTCC |
| | | GTGTCCTCCAACCTGGCTTGGTACCAGCAGAAGCCGGGGCAGGCCCCT |
| | | AGACTCCTGATCTATGGGGCGTCGACCCGGGCATCTGGAATTCCCGAT |
| | | AGGTTCAGCGGATCGGGCTCGGGCACTGACTTCACTCTGACCATCTCC |
| | | TCGCTGCAAGCCGAGGACGTGGCTGTGTACTACTGTCAGCAGTACGGA |
| | | AGCTCCCTGACTTTCGGTGGCGGGACCAAAGTCGAGATTAAG |
| 139104-aa | 1444 | EVQLLETGGGLVQPGGSLRLSCAVSGFALSNHGMSWVRRAPGKGLEWV |
| VH | | SGIVYSGSTYYAASVKGRFTISRDNSRNTLYLQMNSLRPEDTAIYYCS |
| | | AHGGESDVWGQGTTVTVSS |
| 139104-aa | 1445 | EIVLTQSPATLSVSPGESATLSCRASQSVSSNLAWYQQKPGQAPRLLI |
| VL | | YGASTRASGIPDRFSGSGSGTDFTLTISSLQAEDVAVYYCQQYGSSLT |
| | | FGGGTKVEIK |
| 139104-aa | 1446 | MALPVTALLLPLALLLHAARPEVQLLETGGGLVQPGGSLRLSCAVSGF |
| Full CAR | | ALSNHGMSWVRRAPGKGLEWVSGIVYSGSTYYAASVKGRFTISRDNSR |
| | | NTLYLQMNSLRPEDTAIYYCSAHGGESDVWGQGTTVTVSSASGGGGSG |
| | | GRASGGGGSEIVLTQSPATLSVSPGESATLSCRASQSVSSNLAWYQQK |
| | | PGQAPRLLIYGASTRASGIPDRFSGSGSGTDFTLTISSLQAEDVAVYY |
| | | CQQYGSSLTFGGGTKVEIKTTTPAPRPPTPAPTIASQPLSLRPEACRP |
| | | AAGGAVHTRGLDFACDIYIWAPLAGTCGVLLLSLVITLYCKRGRKKLL |
| | | YIFKQPFMRPVQTTQEEDGCSCRFPEEEEGGCELRVKFSRSADAPAYK |
| | | QGQNQLYNELNLGRREEYDVLDKRRGRDPEMGGKPRRKNPQEGLYNEL |
| | | QKDKMAEAYSEIGMKGERRRGKGHDGLYQGLSTATKDTYDALHMQALP |
| | | PR |
| 139104-nt | 1447 | ATGGCCCTCCCTGTCACCGCCCTGCTGCTTCCGCTGGCTCTTCTGCTC |
| Full CAR | | CACGCCGCTCGGCCCGAAGTGCAATTGCTCGAAACTGGAGGAGGTCTG |
| | | GTGCAACCTGGAGGATCACTTCGCCTGTCCTGCGCCGTGTCGGGCTTT |
| | | GCCCTGTCCAACCATGGAATGAGCTGGGTCCGCCGCGCGCCGGGGAAG |
| | | GGCCTCGAATGGGTGTCCGGCATCGTCTACTCCGGCTCCACCTACTAC |
| | | GCCGCGTCCGTGAAGGGCCGGTTCACGATTTCACGGGACAACTCGCGG |
| | | AACACCCTGTACCTCCAAATGAATTCCCTTCGGCCGGAGGATACTGCC |
| | | ATCTACTACTGCTCCGCCCACGGTGGCGAATCCGACGTCTGGGGCCAG |
| | | GGAACCACCGTGACCGTGTCCAGCGCGTCCGGGGGAGGAGGAAGCGGG |
| | | GGTAGAGCATCGGGTGGAGGCGGATCAGAGATCGTGCTGACCCAGTCC |
| | | CCCGCCACCTTGAGCGTGTCACCAGGAGAGTCCGCCACCCTGTCATGC |
| | | CGCGCCAGCCAGTCCGTGTCCTCCAACCTGGCTTGGTACCAGCAGAAG |
| | | CCGGGGCAGGCCCCTAGACTCCTGATCTATGGGGCGTCGACCCGGGCA |
| | | TCTGGAATTCCCGATAGGTTCAGCGGATCGGGCTCGGGCACTGACTTC |
| | | ACTCTGACCATCTCCTCGCTGCAAGCCGAGGACGTGGCTGTGTACTAC |
| | | TGTCAGCAGTACGGAAGCTCCCTGACTTTCGGTGGCGGGACCAAAGTC |
| | | GAGATTAAGACCACTACCCCAGCACCGAGGCCACCCACCCCGGCTCCT |
| | | ACCATCGCCTCCCAGCCTCTGTCCCTGCGTCCGGAGGCATGTAGACCC |
| | | GCAGCTGGTGGGGCCGTGCATACCCGGGGTCTTGACTTCGCCTGCGAT |
| | | ATCTACATTTGGGCCCCTCTGGCTGGTACTTGCGGGGTCCTGCTGCTT |
| | | TCACTCGTGATCACTCTTTACTGTAAGCGCGGTCGGAAGAAGCTGCTG |
| | | TACATCTTTAAGCAACCCTTCATGAGGCCTGTGCAGACTACTCAAGAG |
| | | GAGGACGGCTGTTCATGCCGGTTCCCAGAGGAGGAGGAAGGCGGCTGC |
| | | GAACTGCGCGTGAAATTCAGCCGCAGCGCAGATGCTCCAGCCTACAAG |
| | | CAGGGGCAGAACCAGCTCTACAACGAACTCAATCTTGGTCGGAGAGAG |
| | | GAGTACGACGTGCTGGACAAGCGGAGAGGACGGGACCCAGAAATGGGC |
| | | GGGAAGCCGCGCAGAAAGAATCCCCAAGAGGGCCTGTACAACGAGCTC |
| | | CAAAAGGATAAGATGGCAGAAGCCTATAGCGAGATTGGTATGAAAGGG |
| | | GAACGCAGAAGAGGCAAAGGCCACGACGGACTGTACCAGGGACTCAGC |
| | | ACCGCCACCAAGGACACCTATGACGCTCTTCACATGCAGGCCCTGCCG |
| | | CCTCGG |

139106

| | | |
|---|---|---|
| 139106-aa | 1448 | EVQLVETGGGLVQPGGSLRLSCAVSGFALSNHGMSWVRRAPGKGLEWV |
| ScFv | | SGIVYSGSTYYAASVKGRFTISRDNSRNTLYLQMNSLRPEDTAIYYCS |
| domain | | AHGGESDVWGQGTTVTVSSASGGGGSGGRASGGGGSEIVMTQSPATLS |
| | | VSPGERATLSCRASQSVSSKLAWYQQKPGQAPRLLMYGASIRATGIPD |
| | | RFSGSGSGTEFTLTISSLEPEDFAVYYCQQYGSSSWTFGQGTKVEIK |
| 139106-nt | 1449 | GAAGTGCAATTGGTGGAAACTGGAGGAGGACTTGTGCAACCTGGAGGA |
| ScFv | | TCATTGAGACTGAGCTGCGCAGTGTCGGGATTCGCCCTGAGCAACCAT |
| domain | | GGAATGTCCTGGGTCAGAAGGGCCCCTGGAAAAGGCCTCGAATGGGTG |
| | | TCAGGGATCGTGTACTCCGGTTCCACTTACTACGCCGCCTCCGTGAAG |
| | | GGGCGCTTCACTATCTCACGGGATAACTCCCGCAATACCCTGTACCTC |
| | | CAAATGAACAGCCTGCGGCCGGAGGATACCGCCATCTACTACTGTTCC |
| | | GCCCACGGTGGAGAGTCTGACGTCTGGGGCCAGGGAACTACCGTGACC |
| | | GTGTCCTCCGCGTCCGGCGGTGGAGGGAGCGGCGGCCGCGCCAGCGGC |
| | | GGCGGAGGCTCCGAGATCGTGATGACCCAGAGCCCCGCTACTCTGTCG |
| | | GTGTCGCCCGGAGAAAGGGCGACCCTGTCCTGCCGGGCGTCGCAGTCC |
| | | GTGAGCAGCAAGCTGGCTTGGTACCAGCAGAAGCCGGGCCAGGCACCA |
| | | CGCCTGCTTATGTACGGTGCCTCCATTCGGGCCACCGGAATCCCGGAC |
| | | CGGTTCTCGGGGTCGGGGTCCGGTACCGAGTTCACACTGACCATTTCC |
| | | TCGCTCGAGCCCGAGGACTTTGCCGTCTATTACTGCCAGCAGTACGGC |
| | | TCCTCCTCATGGACGTTCGGCCAGGGGACCAAGGTCGAAATCAAG |
| 139106-aa | 1450 | EVQLVETGGGLVQPGGSLRLSCAVSGFALSNHGMSWVRRAPGKGLEWV |
| VH | | SGIVYSGSTYYAASVKGRFTISRDNSRNTLYLQMNSLRPEDTAIYYCS |
| | | AHGGESDVWGQGTTVTVSS |
| 139106-aa | 1451 | EIVMTQSPATLSVSPGERATLSCRASQSVSSKLAWYQQKPGQAPRLLM |
| VL | | YGASIRATGIPDRFSGSGSGTEFTLTISSLEPEDFAVYYCQQYGSSSW |
| | | TFGQGTKVEIK |
| 139106-aa | 1452 | MALPVTALLLPLALLLHAARPEVQLVETGGGLVQPGGSLRLSCAVSGF |
| Full CAR | | ALSNHGMSWVRRAPGKGLEWVSGIVYSGSTYYAASVKGRFTISRDNSR |
| | | NTLYLQMNSLRPEDTAIYYCSAHGGESDVWGQGTTVTVSSASGGGGSG |
| | | GRASGGGGSEIVMTQSPATLSVSPGERATLSCRASQSVSSKLAWYQQK |
| | | PGQAPRLLMYGASIRATGIPDRFSGSGSGTEFTLTISSLEPEDFAVYY |
| | | CQQYGSSSWTFGQGTKVEIKTTTPAPRPPTPAPTIASQPLSLRPEACR |
| | | PAAGGAVHTRGLDFACDIYIWAPLAGTCGVLLLSLVITLYCKRGRKKL |
| | | LYIFKQPFMRPVQTTQEEDGCSCRFPEEEEGGCELRVKFSRSADAPAY |
| | | KQGQNQLYNELNLGRREEYDVLDKRRGRDPEMGGKPRRKNPQEGLYNE |
| | | LQKDKMAEAYSEIGMKGERRRGKGHDGLYQGLSTATKDTYDALHMQAL |
| | | PPR |
| 139106-nt | 1453 | ATGGCCCTCCCTGTCACCGCCCTGCTGCTTCCGCTGGCTCTTCTGCTC |
| Full CAR | | CACGCCGCTCGGCCCGAAGTGCAATTGGTGGAAACTGGAGGAGGACTT |
| | | GTGCAACCTGGAGGATCATTGAGACTGAGCTGCGCAGTGTCGGGATTC |
| | | GCCCTGAGCAACCATGGAATGTCCTGGGTCAGAAGGGCCCCTGGAAAA |
| | | GGCCTCGAATGGGTGTCAGGGATCGTGTACTCCGGTTCCACTTACTAC |
| | | GCCGCCTCCGTGAAGGGGCGCTTCACTATCTCACGGGATAACTCCCGC |
| | | AATACCCTGTACCTCCAAATGAACAGCCTGCGGCCGGAGGATACCGCC |
| | | ATCTACTACTGTTCCGCCCACGGTGGAGAGTCTGACGTCTGGGGCCAG |
| | | GGAACTACCGTGACCGTGTCCTCCGCGTCCGGCGGTGGAGGGAGCGGC |
| | | GGCCGCGCCAGCGGCGGCGGAGGCTCCGAGATCGTGATGACCCAGAGC |
| | | CCCGCTACTCTGTCGGTGTCGCCCGGAGAAAGGGCGACCCTGTCCTGC |
| | | CGGGCGTCGCAGTCCGTGAGCAGCAAGCTGGCTTGGTACCAGCAGAAG |
| | | CCGGGCCAGGCACCACGCCTGCTTATGTACGGTGCCTCCATTCGGGCC |
| | | ACCGGAATCCCGGACCGGTTCTCGGGGTCGGGGTCCGGTACCGAGTTC |
| | | ACACTGACCATTTCCTCGCTCGAGCCCGAGGACTTTGCCGTCTATTAC |
| | | TGCCAGCAGTACGGCTCCTCCTCATGGACGTTCGGCCAGGGGACCAAG |
| | | GTCGAAATCAAGACCACTACCCCAGCACCGAGGCCACCCACCCCGGCT |
| | | CCTACCATCGCCTCCCAGCCTCTGTCCCTGCGTCCGGAGGCATGTAGA |
| | | CCCGCAGCTGGTGGGGCCGTGCATACCCGGGGTCTTGACTTCGCCTGC |
| | | GATATCTACATTTGGGCCCCTCTGGCTGGTACTTGCGGGGTCCTGCTG |
| | | CTTTCACTCGTGATCACTCTTTACTGTAAGCGCGGTCGGAAGAAGCTG |
| | | CTGTACATCTTTAAGCAACCCTTCATGAGGCCTGTGCAGACTACTCAA |
| | | GAGGAGGACGGCTGTTCATGCCGGTTCCCAGAGGAGGAGGAAGGCGGC |
| | | TGCGAACTGCGCGTGAAATTCAGCCGCAGCGCAGATGCTCCAGCCTAC |
| | | AAGCAGGGGCAGAACCAGCTCTACAACGAACTCAATCTTGGTCGGAGA |
| | | GAGGAGTACGACGTGCTGGACAAGCGGAGAGGACGGGACCCAGAAATG |
| | | GGCGGGAAGCCGCGCAGAAAGAATCCCCAAGAGGGCCTGTACAACGAG |
| | | CTCCAAAAGGATAAGATGGCAGAAGCCTATAGCGAGATTGGTATGAAA |
| | | GGGGAACGCAGAAGAGGCAAAGGCCACGACGGACTGTACCAGGGACTC |
| | | AGCACCGCCACCAAGGACACCTATGACGCTCTTCACATGCAGGCCCTG |
| | | CCGCCTCGG |

139107

| | | |
|---|---|---|
| 139107-aa | 1454 | EVQLVETGGGVVQPGGSLRLSCAVSGFALSNHGMSWVRRAPGKGLEWV |
| ScFv | | SGIVYSGSTYYAASVKGRFTISRDNSRNTLYLQMNSLRPEDTAIYYCS |
| domain | | AHGGESDVWGQGTTVTVSSASGGGGSGGRASGGGGSEIVLTQSPGTLS |
| | | LSPGERATLSCRASQSVGSTNLAWYQQKPGQAPRLLIYDASNRATGIP |
| | | DRFSGGGSGTDFTLTISRLEPEDFAVYYCQQYGSSPPWTFGQGTKVEI |
| | | K |
| 139107-nt | 1455 | GAAGTGCAATTGGTGGAGACTGGAGGAGGAGTGGTGCAACCTGGAGGA |
| ScFv | | AGCCTGAGACTGTCATGCGCGGTGTCGGGCTTCGCCCTCTCCAACCAC |
| domain | | GGAATGTCCTGGGTCCGCCGGGCCCCTGGGAAAGGACTTGAATGGGTG |
| | | TCCGGCATCGTGTACTCGGGTTCCACCTACTACGCGGCCTCAGTGAAG |
| | | GGCCGGTTTACTATTAGCCGCGACAACTCCAGAAACACACTGTACCTC |
| | | CAAATGAACTCGCTGCGGCCGGAAGATACCGCTATCTACTACTGCTCC |
| | | GCCCATGGGGGAGAGTCGGACGTCTGGGGACAGGGCACCACTGTCACT |
| | | GTGTCCAGCGCTTCCGGCGGTGGTGGAAGCGGGGGACGGGCCTCAGGA |
| | | GGCGGTGGCAGCGAGATTGTGCTGACCCAGTCCCCCGGGACCCTGAGC |
| | | CTGTCCCCGGGAGAAAGGGCCACCCTCTCCTGTCGGGCATCCCAGTCC |
| | | GTGGGGTCTACTAACCTTGCATGGTACCAGCAGAAGCCCGGCCAGGCC |
| | | CCTCGCCTGCTGATCTACGACGCGTCCAATAGAGCCACCGGCATCCCG |
| | | GATCGCTTCAGCGGAGGCGGATCGGGCACCGACTTCACCCTCACCATT |
| | | TCAAGGCTGGAACCGGAGGACTTCGCCGTGTACTACTGCCAGCAGTAT |
| | | GGTTCGTCCCCACCCTGGACGTTCGGCCAGGGGACTAAGGTCGAGATC |
| | | AAG |
| 139107-aa | 1456 | EVQLVETGGGVVQPGGSLRLSCAVSGFALSNHGMSWVRRAPGKGLEWV |
| VH | | SGIVYSGSTYYAASVKGRFTISRDNSRNTLYLQMNSLRPEDTAIYYCS |
| | | AHGGESDVWGQGTTVTVSS |
| 139107-aa | 1457 | EIVLTQSPGTLSLSPGERATLSCRASQSVGSTNLAWYQQKPGQAPRLL |
| VL | | IYDASNRATGIPDRFSGGGSGTDFTLTISRLEPEDFAVYYCQQYGSSP |
| | | PWTFGQGTKVEIK |
| 139107-aa | 1458 | MALPVTALLLPLALLLHAARPEVQLVETGGGVVQPGGSLRLSCAVSGF |
| Full CAR | | ALSNHGMSWVRRAPGKGLEWVSGIVYSGSTYYAASVKGRFTISRDNSR |
| | | NTLYLQMNSLRPEDTAIYYCSAHGGESDVWGQGTTVTVSSASGGGGSG |
| | | GRASGGGGSEIVLTQSPGTLSLSPGERATLSCRASQSVGSTNLAWYQQ |
| | | KPGQAPRLLIYDASNRATGIPDRFSGGGSGTDFTLTISRLEPEDFAVY |
| | | YCQQYGSSPPWTFGQGTKVEIKTTTPAPRPPTPAPTIASQPLSLRPEA |
| | | CRPAAGGAVHTRGLDFACDIYIWAPLAGTCGVLLLSLVITLYCKRGRK |
| | | KLLYIFKQPFMRPVQTTQEEDGCSCRFPEEEEGGCELRVKFSRSADAP |
| | | AYKQGQNQLYNELNLGRREEYDVLDKRRGRDPEMGGKPRRKNPQEGLY |
| | | NELQKDKMAEAYSEIGMKGERRRGKGHDGLYQGLSTATKDTYDALHMQ |
| | | ALPPR |
| 139107-nt | 1459 | ATGGCCCTCCCTGTCACCGCCCTGCTGCTTCCGCTGGCTCTTCTGCTC |
| Full CAR | | CACGCCGCTCGGCCCGAAGTGCAATTGGTGGAGACTGGAGGAGGAGTG |
| | | GTGCAACCTGGAGGAAGCCTGAGACTGTCATGCGCGGTGTCGGGCTTC |
| | | GCCCTCTCCAACCACGGAATGTCCTGGGTCCGCCGGGCCCCTGGGAAA |
| | | GGACTTGAATGGGTGTCCGGCATCGTGTACTCGGGTTCCACCTACTAC |
| | | GCGGCCTCAGTGAAGGGCCGGTTTACTATTAGCCGCGACAACTCCAGA |
| | | AACACACTGTACCTCCAAATGAACTCGCTGCGGCCGGAAGATACCGCT |
| | | ATCTACTACTGCTCCGCCCATGGGGGAGAGTCGGACGTCTGGGGACAG |
| | | GGCACCACTGTCACTGTGTCCAGCGCTTCCGGCGGTGGTGGAAGCGGG |
| | | GGACGGGCCTCAGGAGGCGGTGGCAGCGAGATTGTGCTGACCCAGTCC |
| | | CCCGGGACCCTGAGCCTGTCCCCGGGAGAAAGGGCCACCCTCTCCTGT |
| | | CGGGCATCCCAGTCCGTGGGGTCTACTAACCTTGCATGGTACCAGCAG |
| | | AAGCCCGGCCAGGCCCCTCGCCTGCTGATCTACGACGCGTCCAATAGA |
| | | GCCACCGGCATCCCGGATCGCTTCAGCGGAGGCGGATCGGGCACCGAC |
| | | TTCACCCTCACCATTTCAAGGCTGGAACCGGAGGACTTCGCCGTGTAC |
| | | TACTGCCAGCAGTATGGTTCGTCCCCACCCTGGACGTTCGGCCAGGGG |
| | | ACTAAGGTCGAGATCAAGACCACTACCCCAGCACCGAGGCCACCCACC |
| | | CCGGCTCCTACCATCGCCTCCCAGCCTCTGTCCCTGCGTCCGGAGGCA |
| | | TGTAGACCCGCAGCTGGTGGGGCCGTGCATACCCGGGGTCTTGACTTC |
| | | GCCTGCGATATCTACATTTGGGCCCCTCTGGCTGGTACTTGCGGGGTC |
| | | CTGCTGCTTTCACTCGTGATCACTCTTTACTGTAAGCGCGGTCGGAAG |
| | | AAGCTGCTGTACATCTTTAAGCAACCCTTCATGAGGCCTGTGCAGACT |
| | | ACTCAAGAGGAGGACGGCTGTTCATGCCGGTTCCCAGAGGAGGAGGAA |
| | | GGCGGCTGCGAACTGCGCGTGAAATTCAGCCGCAGCGCAGATGCTCCA |
| | | GCCTACAAGCAGGGGCAGAACCAGCTCTACAACGAACTCAATCTTGGT |
| | | CGGAGAGAGGAGTACGACGTGCTGGACAAGCGGAGAGGACGGGACCCA |
| | | GAAATGGGCGGGAAGCCGCGCAGAAAGAATCCCCAAGAGGGCCTGTAC |
| | | AACGAGCTCCAAAAGGATAAGATGGCAGAAGCCTATAGCGAGATTGGT |
| | | ATGAAAGGGGAACGCAGAAGAGGCAAAGGCCACGACGGACTGTACCAG |
| | | GGACTCAGCACCGCCACCAAGGACACCTATGACGCTCTTCACATGCAG |
| | | GCCCTGCCGCCTCGG |

139108

| | | |
|---|---|---|
| 139108-aa | 1460 | QVQLVESGGGLVKPGGSLRLSCAASGFTFSDYYMSWIRQAPGKGLEWV |
| ScFv | | SYISSSGSTIYYADSVKGRFTISRDNAKNSLYLQMNSLRAEDTAVYYC |
| domain | | ARESGDGMDVWGQGTTVTVSSASGGGGSGGRASGGGGSDIQMTQSPSS |
| | | LSASVGDRVTITCRASQSISSYLNWYQQKPGKAPKLLIYAASSLQSGV |
| | | PSRFSGSGSGTDFTLTISSLQPEDFATYYCQQSYTLAFGQGTKVDIK |
| 139108-nt | 1461 | CAAGTGCAACTCGTGGAATCTGGTGGAGGACTCGTGAAACCTGGAGGA |
| ScFv | | TCATTGAGACTGTCATGCGCGGCCTCGGGATTCACGTTCTCCGATTAC |
| domain | | TACATGAGCTGGATTCGCCAGGCTCCGGGGAAGGGACTGGAATGGGTG |
| | | TCCTACATTTCCTCATCCGGCTCCACCATCTACTACGCGGACTCCGTG |
| | | AAGGGGAGATTCACCATTAGCCGCGATAACGCCAAGAACAGCCTGTAC |
| | | CTTCAGATGAACTCCCTGCGGGCTGAAGATACTGCCGTCTACTACTGC |
| | | GCAAGGGAGAGCGGAGATGGGATGGACGTCTGGGGACAGGGTACCACT |
| | | GTGACCGTGTCGTCGGCCTCCGGCGGAGGGGGTTCGGGTGGAAGGGCC |
| | | AGCGGCGGCGGAGGCAGCGACATCCAGATGACCCAGTCCCCCTCATCG |
| | | CTGTCCGCCTCCGTGGGCGACCGCGTCACCATCACATGCCGGGCCTCA |
| | | CAGTCGATCTCCTCCTACCTCAATTGGTATCAGCAGAAGCCCGGAAAG |
| | | GCCCCTAAGCTTCTGATCTACGCAGCGTCCTCCCTGCAATCCGGGGTC |
| | | CCATCTCGGTTCTCCGGCTCGGGCAGCGGTACCGACTTCACTCTGACC |
| | | ATCTCGAGCCTGCAGCCGGAGGACTTCGCCACTTACTACTGTCAGCAA |
| | | AGCTACACCCTCGCGTTTGGCCAGGGCACCAAAGTGGACATCAAG |
| 139108-aa | 1462 | QVQLVESGGGLVKPGGSLRLSCAASGFTFSDYYMSWIRQAPGKGLEWV |
| VH | | SYISSSGSTIYYADSVKGRFTISRDNAKNSLYLQMNSLRAEDTAVYYC |
| | | ARESGDGMDVWGQGTTVTVSS |
| 139108-aa | 1463 | DIQMTQSPSSLSASVGDRVTITCRASQSISSYLNWYQQKPGKAPKLLI |
| VL | | YAASSLQSGVPSRFSGSGSGTDFTLTISSLQPEDFATYYCQQSYTLAF |
| | | GQGTKVDIK |
| 139108-aa | 1464 | MALPVTALLLPLALLLHAARPQVQLVESGGGLVKPGGSLRLSCAASGF |
| Full CAR | | TFSDYYMSWIRQAPGKGLEWVSYISSSGSTIYYADSVKGRFTISRDNA |
| | | KNSLYLQMNSLRAEDTAVYYCARESGDGMDVWGQGTTVTVSSASGGGG |
| | | SGGRASGGGGSDIQMTQSPSSLSASVGDRVTITCRASQSISSYLNWYQ |
| | | QKPGKAPKLLIYAASSLQSGVPSRFSGSGSGTDFTLTISSLQPEDFAT |
| | | YYCQQSYTLAFGQGTKVDIKTTTPAPRPPTPAPTIASQPLSLRPEACR |
| | | PAAGGAVHTRGLDFACDIYIWAPLAGTCGVLLLSLVITLYCKRGRKKL |
| | | LYIFKQPFMRPVQTTQEEDGCSCRFPEEEEGGCELRVKFSRSADAPAY |
| | | KQGQNQLYNELNLGRREEYDVLDKRRGRDPEMGGKPRRKNPQEGLYNE |
| | | LQKDKMAEAYSEIGMKGERRRGKGHDGLYQGLSTATKDTYDALHMQAL |
| | | PPR |
| 139108-nt | 1465 | ATGGCCCTCCCTGTCACCGCCCTGCTGCTTCCGCTGGCTCTTCTGCTC |
| Full CAR | | CACGCCGCTCGGCCCCAAGTGCAACTCGTGGAATCTGGTGGAGGACTC |
| | | GTGAAACCTGGAGGATCATTGAGACTGTCATGCGCGGCCTCGGGATTC |
| | | ACGTTCTCCGATTACTACATGAGCTGGATTCGCCAGGCTCCGGGGAAG |
| | | GGACTGGAATGGGTGTCCTACATTTCCTCATCCGGCTCCACCATCTAC |
| | | TACGCGGACTCCGTGAAGGGGAGATTCACCATTAGCCGCGATAACGCC |
| | | AAGAACAGCCTGTACCTTCAGATGAACTCCCTGCGGGCTGAAGATACT |
| | | GCCGTCTACTACTGCGCAAGGGAGAGCGGAGATGGGATGGACGTCTGG |
| | | GGACAGGGTACCACTGTGACCGTGTCGTCGGCCTCCGGCGGAGGGGGT |
| | | TCGGGTGGAAGGGCCAGCGGCGGCGGAGGCAGCGACATCCAGATGACC |
| | | CAGTCCCCCTCATCGCTGTCCGCCTCCGTGGGCGACCGCGTCACCATC |
| | | ACATGCCGGGCCTCACAGTCGATCTCCTCCTACCTCAATTGGTATCAG |
| | | CAGAAGCCCGGAAAGGCCCCTAAGCTTCTGATCTACGCAGCGTCCTCC |
| | | CTGCAATCCGGGGTCCCATCTCGGTTCTCCGGCTCGGGCAGCGGTACC |
| | | GACTTCACTCTGACCATCTCGAGCCTGCAGCCGGAGGACTTCGCCACT |
| | | TACTACTGTCAGCAAAGCTACACCCTCGCGTTTGGCCAGGGCACCAAA |
| | | GTGGACATCAAGACCACTACCCCAGCACCGAGGCCACCCACCCCGGCT |
| | | CCTACCATCGCCTCCCAGCCTCTGTCCCTGCGTCCGGAGGCATGTAGA |
| | | CCCGCAGCTGGTGGGGCCGTGCATACCCGGGGTCTTGACTTCGCCTGC |
| | | GATATCTACATTTGGGCCCCTCTGGCTGGTACTTGCGGGGTCCTGCTG |
| | | CTTTCACTCGTGATCACTCTTTACTGTAAGCGCGGTCGGAAGAAGCTG |
| | | CTGTACATCTTTAAGCAACCCTTCATGAGGCCTGTGCAGACTACTCAA |
| | | GAGGAGGACGGCTGTTCATGCCGGTTCCCAGAGGAGGAGGAAGGCGGC |
| | | TGCGAACTGCGCGTGAAATTCAGCCGCAGCGCAGATGCTCCAGCCTAC |
| | | AAGCAGGGGCAGAACCAGCTCTACAACGAACTCAATCTTGGTCGGAGA |
| | | GAGGAGTACGACGTGCTGGACAAGCGGAGAGGACGGGACCCAGAAATG |
| | | GGCGGGAAGCCGCGCAGAAAGAATCCCCAAGAGGGCCTGTACAACGAG |
| | | CTCCAAAAGGATAAGATGGCAGAAGCCTATAGCGAGATTGGTATGAAA |
| | | GGGGAACGCAGAAGAGGCAAAGGCCACGACGGACTGTACCAGGGACTC |
| | | AGCACCGCCACCAAGGACACCTATGACGCTCTTCACATGCAGGCCCTG |
| | | CCGCCTCGG |

139110

| | | |
|---|---|---|
| 139110-aa | 1466 | QVQLVQSGGGLVKPGGSLRLSCAASGFTFSDYYMSWIRQAPGKGLEWV |
| ScFv | | SYISSSGNTIYYADSVKGRFTISRDNAKNSLYLQMNSLRAEDTAVYYC |
| domain | | ARSTMVREDYWGQGTLVTVSSASGGGGSGGRASGGGGSDIVLTQSPLS |
| | | LPVTLGQPASISCKSSESLVHNSGKTYLNWFHQRPGQSPRRLIYEVSN |
| | | RDSGVPDRFTGSGSGTDFTLKISRVEAEDVGVYYCMQGTHWPGTFGQG |
| | | TKLEIK |
| 139110-nt | 1467 | CAAGTGCAACTGGTGCAAAGCGGAGGAGGATTGGTCAAACCCGGAGGA |
| ScFv | | AGCCTGAGACTGTCATGCGCGGCCTCTGGATTCACCTTCTCCGATTAC |
| domain | | TACATGTCATGGATCAGACAGGCCCCGGGGAAGGGCCTCGAATGGGTG |
| | | TCCTACATCTCGTCCTCCGGGAACACCATCTACTACGCCGACAGCGTG |
| | | AAGGGCCGCTTTACCATTTCCCGCGACAACGCAAAGAACTCGCTGTAC |
| | | CTTCAGATGAATTCCCTGCGGGCTGAAGATACCGCGGTGTACTATTGC |
| | | GCCCGGTCCACTATGGTCCGGGAGGACTACTGGGGACAGGGCACACTC |
| | | GTGACCGTGTCCAGCGCGAGCGGGGGTGGAGGCAGCGGTGGACGCGCC |
| | | TCCGGCGGCGGCGGTTCAGACATCGTGCTGACTCAGTCGCCCCTGTCG |
| | | CTGCCGGTCACCCTGGGCCAACCGGCCTCAATTAGCTGCAAGTCCTCG |
| | | GAGAGCCTGGTGCACAACTCAGGAAAGACTTACCTGAACTGGTTCCAT |
| | | CAGCGGCCTGGACAGTCCCCACGGAGGCTCATCTATGAAGTGTCCAAC |
| | | AGGGATTCGGGGGTGCCCGACCGCTTCACTGGCTCCGGGTCCGGCACC |
| | | GACTTCACCTTGAAAATCTCCAGAGTGGAAGCCGAGGACGTGGGCGTG |
| | | TACTACTGTATGCAGGGTACCCACTGGCCTGGAACCTTTGGACAAGGA |
| | | ACTAAGCTCGAGATTAAG |
| 139110-aa | 1468 | QVQLVQSGGGLVKPGGSLRLSCAASGFTFSDYYMSWIRQAPGKGLEWV |
| VH | | SYISSSGNTIYYADSVKGRFTISRDNAKNSLYLQMNSLRAEDTAVYYC |
| | | ARSTMVREDYWGQGTLVTVSS |
| 139110-aa | 1469 | DIVLTQSPLSLPVTLGQPASISCKSSESLVHNSGKTYLNWFHQRPGQS |
| VL | | PRRLIYEVSNRDSGVPDRFTGSGSGTDFTLKISRVEAEDVGVYYCMQG |
| | | THWPGTFGQGTKLEIK |
| 139110-aa | 1470 | MALPVTALLLPLALLLHAARPQVQLVQSGGGLVKPGGSLRLSCAASGF |
| Full CAR | | TFSDYYMSWIRQAPGKGLEWVSYISSSGNTIYYADSVKGRFTISRDNA |
| | | KNSLYLQMNSLRAEDTAVYYCARSTMVREDYWGQGTLVTVSSASGGGG |
| | | SGGRASGGGGSDIVLTQSPLSLPVTLGQPASISCKSSESLVHNSGKTY |
| | | LNWFHQRPGQSPRRLIYEVSNRDSGVPDRFTGSGSGTDFTLKISRVEA |
| | | EDVGVYYCMQGTHWPGTFGQGTKLEIKTTTPAPRPPTPAPTIASQPLS |
| | | LRPEACRPAAGGAVHTRGLDFACDIYIWAPLAGTCGVLLLSLVITLYC |
| | | KRGRKKLLYIFKQPFMRPVQTTQEEDGCSCRFPEEEEGGCELRVKFSR |
| | | SADAPAYKQGQNQLYNELNLGRREEYDVLDKRRGRDPEMGGKPRRKNP |
| | | QEGLYNELQKDKMAEAYSEIGMKGERRRGKGHDGLYQGLSTATKDTYD |
| | | ALHMQALPPR |
| 139110-nt | 1471 | ATGGCCCTCCCTGTCACCGCCCTGCTGCTTCCGCTGGCTCTTCTGCTC |
| Full CAR | | CACGCCGCTCGGCCCCAAGTGCAACTGGTGCAAAGCGGAGGAGGATTG |
| | | GTCAAACCCGGAGGAAGCCTGAGACTGTCATGCGCGGCCTCTGGATTC |
| | | ACCTTCTCCGATTACTACATGTCATGGATCAGACAGGCCCCGGGGAAG |
| | | GGCCTCGAATGGGTGTCCTACATCTCGTCCTCCGGGAACACCATCTAC |
| | | TACGCCGACAGCGTGAAGGGCCGCTTTACCATTTCCCGCGACAACGCA |
| | | AAGAACTCGCTGTACCTTCAGATGAATTCCCTGCGGGCTGAAGATACC |
| | | GCGGTGTACTATTGCGCCCGGTCCACTATGGTCCGGGAGGACTACTGG |
| | | GGACAGGGCACACTCGTGACCGTGTCCAGCGCGAGCGGGGGTGGAGGC |
| | | AGCGGTGGACGCGCCTCCGGCGGCGGCGGTTCAGACATCGTGCTGACT |
| | | CAGTCGCCCCTGTCGCTGCCGGTCACCCTGGGCCAACCGGCCTCAATT |
| | | AGCTGCAAGTCCTCGGAGAGCCTGGTGCACAACTCAGGAAAGACTTAC |
| | | CTGAACTGGTTCCATCAGCGGCCTGGACAGTCCCCACGGAGGCTCATC |
| | | TATGAAGTGTCCAACAGGGATTCGGGGGTGCCCGACCGCTTCACTGGC |
| | | TCCGGGTCCGGCACCGACTTCACCTTGAAAATCTCCAGAGTGGAAGCC |
| | | GAGGACGTGGGCGTGTACTACTGTATGCAGGGTACCCACTGGCCTGGA |
| | | ACCTTTGGACAAGGAACTAAGCTCGAGATTAAGACCACTACCCCAGCA |
| | | CCGAGGCCACCCACCCCGGCTCCTACCATCGCCTCCCAGCCTCTGTCC |
| | | CTGCGTCCGGAGGCATGTAGACCCGCAGCTGGTGGGGCCGTGCATACC |
| | | CGGGGTCTTGACTTCGCCTGCGATATCTACATTTGGGCCCCTCTGGCT |
| | | GGTACTTGCGGGGTCCTGCTGCTTTCACTCGTGATCACTCTTTACTGT |
| | | AAGCGCGGTCGGAAGAAGCTGCTGTACATCTTTAAGCAACCCTTCATG |
| | | AGGCCTGTGCAGACTACTCAAGAGGAGGACGGCTGTTCATGCCGGTTC |
| | | CCAGAGGAGGAGGAAGGCGGCTGCGAACTGCGCGTGAAATTCAGCCGC |
| | | AGCGCAGATGCTCCAGCCTACAAGCAGGGGCAGAACCAGCTCTACAAC |
| | | GAACTCAATCTTGGTCGGAGAGAGGAGTACGACGTGCTGGACAAGCGG |
| | | AGAGGACGGGACCCAGAAATGGGCGGGAAGCCGCGCAGAAAGAATCCC |
| | | CAAGAGGGCCTGTACAACGAGCTCCAAAAGGATAAGATGGCAGAAGCC |
| | | TATAGCGAGATTGGTATGAAAGGGGAACGCAGAAGAGGCAAAGGCCAC |
| | | GACGGACTGTACCAGGGACTCAGCACCGCCACCAAGGACACCTATGAC |
| | | GCTCTTCACATGCAGGCCCTGCCGCCTCGG |

139112

| | | |
|---|---|---|
| 139112-aa | 1472 | QVQLVESGGGLVQPGGSLRLSCAVSGFALSNHGMSWVRRAPGKGLEWV |
| ScFv | | SGIVYSGSTYYAASVKGRFTISRDNSRNTLYLQMNSLRPEDTAIYYCS |
| domain | | AHGGESDVWGQGTTVTVSSASGGGGSGGRASGGGGSDIRLTQSPSPLS |
| | | ASVGDRVTITCQASEDINKFLNWYHQTPGKAPKLLIYDASTLQTGVPS |
| | | RFSGSGSGTDFTLTINSLQPEDIGTYYCQQYESLPLTFGGGTKVEIK |
| 139112-nt | 1473 | CAAGTGCAACTCGTGGAATCTGGTGGAGGACTCGTGCAACCCGGTGGA |
| ScFv | | AGCCTTAGGCTGTCGTGCGCCGTCAGCGGGTTTGCTCTGAGCAACCAT |
| domain | | GGAATGTCCTGGGTCCGCCGGGCACCGGGAAAAGGGCTGGAATGGGTG |
| | | TCCGGCATCGTGTACAGCGGGTCAACCTATTACGCCGCGTCCGTGAAG |
| | | GGCAGATTCACTATCTCAAGAGACAACAGCCGGAACACCCTGTACTTG |
| | | CAAATGAATTCCCTGCGCCCCGAGGACACCGCCATCTACTACTGCTCC |
| | | GCCCACGGAGGAGAGTCGGACGTGTGGGGCCAGGGAACGACTGTGACT |
| | | GTGTCCAGCGCATCAGGAGGGGGTGGTTCGGGCGGCCGGGCCTCGGGG |
| | | GGAGGAGGTTCCGACATTCGGCTGACCCAGTCCCCGTCCCCACTGTCG |
| | | GCCTCCGTCGGCGACCGCGTGACCATCACTTGTCAGGCGTCCGAGGAC |
| | | ATTAACAAGTTCCTGAACTGGTACCACCAGACCCCTGGAAAGGCCCCC |
| | | AAGCTGCTGATCTACGATGCCTCGACCCTTCAAACTGGAGTGCCTAGC |
| | | CGGTTCTCCGGGTCCGGCTCCGGCACTGATTTCACTCTGACCATCAAC |
| | | TCATTGCAGCCGGAAGATATCGGGACCTACTATTGCCAGCAGTACGAA |
| | | TCCCTCCCGCTCACATTCGGCGGGGGAACCAAGGTCGAGATTAAG |
| 139112-aa | 1474 | QVQLVESGGGLVQPGGSLRLSCAVSGFALSNHGMSWVRRAPGKGLEWV |
| VH | | SGIVYSGSTYYAASVKGRFTISRDNSRNTLYLQMNSLRPEDTAIYYCS |
| | | AHGGESDVWGQGTTVTVSS |
| 139112-aa | 1475 | DIRLTQSPSPLSASVGDRVTITCQASEDINKFLNWYHQTPGKAPKLLI |
| VL | | YDASTLQTGVPSRFSGSGSGTDFTLTINSLQPEDIGTYYCQQYESLPL |
| | | TFGGGTKVEIK |
| 139112-aa | 1476 | MALPVTALLLPLALLLHAARPQVQLVESGGGLVQPGGSLRLSCAVSGF |
| Full CAR | | ALSNHGMSWVRRAPGKGLEWVSGIVYSGSTYYAASVKGRFTISRDNSR |
| | | NTLYLQMNSLRPEDTAIYYCSAHGGESDVWGQGTTVTVSSASGGGGSG |
| | | GRASGGGGSDIRLTQSPSPLSASVGDRVTITCQASEDINKFLNWYHQT |
| | | PGKAPKLLIYDASTLQTGVPSRFSGSGSGTDFTLTINSLQPEDIGTYY |
| | | CQQYESLPLTFGGGTKVEIKTTTPAPRPPTPAPTIASQPLSLRPEACR |
| | | PAAGGAVHTRGLDFACDIYIWAPLAGTCGVLLLSLVITLYCKRGRKKL |
| | | LYIFKQPFMRPVQTTQEEDGCSCRFPEEEEGGCELRVKFSRSADAPAY |
| | | KQGQNQLYNELNLGRREEYDVLDKRRGRDPEMGGKPRRKNPQEGLYNE |
| | | LQKDKMAEAYSEIGMKGERRRGKGHDGLYQGLSTATKDTYDALHMQAL |
| | | PPR |
| 139112-nt | 1477 | ATGGCCCTCCCTGTCACCGCCCTGCTGCTTCCGCTGGCTCTTCTGCTC |
| Full CAR | | CACGCCGCTCGGCCCCAAGTGCAACTCGTGGAATCTGGTGGAGGACTC |
| | | GTGCAACCCGGTGGAAGCCTTAGGCTGTCGTGCGCCGTCAGCGGGTTT |
| | | GCTCTGAGCAACCATGGAATGTCCTGGGTCCGCCGGGCACCGGGAAAA |
| | | GGGCTGGAATGGGTGTCCGGCATCGTGTACAGCGGGTCAACCTATTAC |
| | | GCCGCGTCCGTGAAGGGCAGATTCACTATCTCAAGAGACAACAGCCGG |
| | | AACACCCTGTACTTGCAAATGAATTCCCTGCGCCCCGAGGACACCGCC |
| | | ATCTACTACTGCTCCGCCCACGGAGGAGAGTCGGACGTGTGGGGCCAG |
| | | GGAACGACTGTGACTGTGTCCAGCGCATCAGGAGGGGGTGGTTCGGGC |
| | | GGCCGGGCCTCGGGGGGAGGAGGTTCCGACATTCGGCTGACCCAGTCC |
| | | CCGTCCCCACTGTCGGCCTCCGTCGGCGACCGCGTGACCATCACTTGT |
| | | CAGGCGTCCGAGGACATTAACAAGTTCCTGAACTGGTACCACCAGACC |
| | | CCTGGAAAGGCCCCCAAGCTGCTGATCTACGATGCCTCGACCCTTCAA |
| | | ACTGGAGTGCCTAGCCGGTTCTCCGGGTCCGGCTCCGGCACTGATTTC |
| | | ACTCTGACCATCAACTCATTGCAGCCGGAAGATATCGGGACCTACTAT |
| | | TGCCAGCAGTACGAATCCCTCCCGCTCACATTCGGCGGGGGAACCAAG |
| | | GTCGAGATTAAGACCACTACCCCAGCACCGAGGCCACCCACCCCGGCT |
| | | CCTACCATCGCCTCCCAGCCTCTGTCCCTGCGTCCGGAGGCATGTAGA |
| | | CCCGCAGCTGGTGGGGCCGTGCATACCCGGGGTCTTGACTTCGCCTGC |
| | | GATATCTACATTTGGGCCCCTCTGGCTGGTACTTGCGGGGTCCTGCTG |
| | | CTTTCACTCGTGATCACTCTTTACTGTAAGCGCGGTCGGAAGAAGCTG |
| | | CTGTACATCTTTAAGCAACCCTTCATGAGGCCTGTGCAGACTACTCAA |
| | | GAGGAGGACGGCTGTTCATGCCGGTTCCCAGAGGAGGAGGAAGGCGGC |
| | | TGCGAACTGCGCGTGAAATTCAGCCGCAGCGCAGATGCTCCAGCCTAC |
| | | AAGCAGGGGCAGAACCAGCTCTACAACGAACTCAATCTTGGTCGGAGA |
| | | GAGGAGTACGACGTGCTGGACAAGCGGAGAGGACGGGACCCAGAAATG |
| | | GGCGGGAAGCCGCGCAGAAAGAATCCCCAAGAGGGCCTGTACAACGAG |
| | | CTCCAAAAGGATAAGATGGCAGAAGCCTATAGCGAGATTGGTATGAAA |
| | | GGGGAACGCAGAAGAGGCAAAGGCCACGACGGACTGTACCAGGGACTC |
| | | AGCACCGCCACCAAGGACACCTATGACGCTCTTCACATGCAGGCCCTG |
| | | CCGCCTCGG |

139113

| | | |
|---|---|---|
| 139113-aa | 1478 | EVQLVETGGGLVQPGGSLRLSCAVSGFALSNHGMSWVRRAPGKGLEWV |
| ScFv | | SGIVYSGSTYYAASVKGRFTISRDNSRNTLYLQMNSLRPEDTAIYYCS |
| domain | | AHGGESDVWGQGTTVTVSSASGGGGSGGRASGGGGSETTLTQSPATLS |
| | | VSPGERATLSCRASQSVGSNLAWYQQKPGQGPRLLIYGASTRATGIPA |
| | | RFSGSGSGTEFTLTISSLQPEDFAVYYCQQYNDWLPVTFGQGTKVEIK |
| 139113-nt | 1480 | GAAGTGCAATTGGTGGAAACTGGAGGAGGACTTGTGCAACCTGGAGGA |
| ScFv | | TCATTGCGGCTCTCATGCGCTGTCTCCGGCTTCGCCCTGTCAAATCAC |
| domain | | GGGATGTCGTGGGTCAGACGGGCCCCGGGAAAGGGTCTGGAATGGGTG |
| | | TCGGGGATTGTGTACAGCGGCTCCACCTACTACGCCGCTTCGGTCAAG |
| | | GGCCGCTTCACTATTTCACGGGACAACAGCCGCAACACCCTCTATCTG |
| | | CAAATGAACTCTCTCCGCCCGGAGGATACCGCCATCTACTACTGCTCC |
| | | GCACACGGCGGCGAATCCGACGTGTGGGGACAGGGAACCACTGTCACC |
| | | GTGTCGTCCGCATCCGGTGGCGGAGGATCGGGTGGCCGGGCCTCCGGG |
| | | GGCGGCGGCAGCGAGACTACCCTGACCCAGTCCCCTGCCACTCTGTCC |
| | | GTGAGCCCGGGAGAGAGAGCCACCCTTAGCTGCCGGGCCAGCCAGAGC |
| | | GTGGGCTCCAACCTGGCCTGGTACCAGCAGAAGCCAGGACAGGGTCCC |
| | | AGGCTGCTGATCTACGGAGCCTCCACTCGCGCGACCGGCATCCCCGCG |
| | | AGGTTCTCCGGGTCGGGTTCCGGGACCGAGTTCACCCTGACCATCTCC |
| | | TCCCTCCAACCGGAGGACTTCGCGGTGTACTACTGTCAGCAGTACAAC |
| | | GATTGGCTGCCCGTGACATTTGGACAGGGGACGAAGGTGGAAATCAAA |
| 139113-aa | 1481 | EVQLVETGGGLVQPGGSLRLSCAVSGFALSNHGMSWVRRAPGKGLEWV |
| VH | | SGIVYSGSTYYAASVKGRFTISRDNSRNTLYLQMNSLRPEDTAIYYCS |
| | | AHGGESDVWGQGTTVTVSS |
| 139113-aa | 1482 | ETTLTQSPATLSVSPGERATLSCRASQSVGSNLAWYQQKPGQGPRLLI |
| VL | | YGASTRATGIPARFSGSGSGTEFTLTISSLQPEDFAVYYCQQYNDWLP |
| | | VTFGQGTKVEIK |
| 139113-aa | 1483 | MALPVTALLLPLALLLHAARPEVQLVETGGGLVQPGGSLRLSCAVSGF |
| Full CAR | | ALSNHGMSWVRRAPGKGLEWVSGIVYSGSTYYAASVKGRFTISRDNSR |
| | | NTLYLQMNSLRPEDTAIYYCSAHGGESDVWGQGTTVTVSSASGGGGSG |
| | | GRASGGGGSETTLTQSPATLSVSPGERATLSCRASQSVGSNLAWYQQK |
| | | PGQGPRLLIYGASTRATGIPARFSGSGSGTEFTLTISSLQPEDFAVYY |
| | | CQQYNDWLPVTFGQGTKVEIKTTTPAPRPPTPAPTIASQPLSLRPEAC |
| | | RPAAGGAVHTRGLDFACDIYIWAPLAGTCGVLLLSLVITLYCKRGRKK |
| | | LLYIFKQPFMRPVQTTQEEDGCSCRFPEEEEGGCELRVKFSRSADAPA |
| | | YKQGQNQLYNELNLGRREEYDVLDKRRGRDPEMGGKPRRKNPQEGLYN |
| | | ELQKDKMAEAYSEIGMKGERRRGKGHDGLYQGLSTATKDTYDALHMQA |
| | | LPPR |
| 139113-nt | 1484 | ATGGCCCTCCCTGTCACCGCCCTGCTGCTTCCGCTGGCTCTTCTGCTC |
| Full CAR | | CACGCCGCTCGGCCCGAAGTGCAATTGGTGGAAACTGGAGGAGGACTT |
| | | GTGCAACCTGGAGGATCATTGCGGCTCTCATGCGCTGTCTCCGGCTTC |
| | | GCCCTGTCAAATCACGGGATGTCGTGGGTCAGACGGGCCCCGGGAAAG |
| | | GGTCTGGAATGGGTGTCGGGGATTGTGTACAGCGGCTCCACCTACTAC |
| | | GCCGCTTCGGTCAAGGGCCGCTTCACTATTTCACGGGACAACAGCCGC |
| | | AACACCCTCTATCTGCAAATGAACTCTCTCCGCCCGGAGGATACCGCC |
| | | ATCTACTACTGCTCCGCACACGGCGGCGAATCCGACGTGTGGGGACAG |
| | | GGAACCACTGTCACCGTGTCGTCCGCATCCGGTGGCGGAGGATCGGGT |
| | | GGCCGGGCCTCCGGGGGCGGCGGCAGCGAGACTACCCTGACCCAGTCC |
| | | CCTGCCACTCTGTCCGTGAGCCCGGGAGAGAGAGCCACCCTTAGCTGC |
| | | CGGGCCAGCCAGAGCGTGGGCTCCAACCTGGCCTGGTACCAGCAGAAG |
| | | CCAGGACAGGGTCCCAGGCTGCTGATCTACGGAGCCTCCACTCGCGCG |
| | | ACCGGCATCCCCGCGAGGTTCTCCGGGTCGGGTTCCGGGACCGAGTTC |
| | | ACCCTGACCATCTCCTCCCTCCAACCGGAGGACTTCGCGGTGTACTAC |
| | | TGTCAGCAGTACAACGATTGGCTGCCCGTGACATTTGGACAGGGGACG |
| | | AAGGTGGAAATCAAAACCACTACCCCAGCACCGAGGCCACCCACCCCG |
| | | GCTCCTACCATCGCCTCCCAGCCTCTGTCCCTGCGTCCGGAGGCATGT |
| | | AGACCCGCAGCTGGTGGGGCCGTGCATACCCGGGGTCTTGACTTCGCC |
| | | TGCGATATCTACATTTGGGCCCCTCTGGCTGGTACTTGCGGGGTCCTG |
| | | CTGCTTTCACTCGTGATCACTCTTTACTGTAAGCGCGGTCGGAAGAAG |
| | | CTGCTGTACATCTTTAAGCAACCCTTCATGAGGCCTGTGCAGACTACT |
| | | CAAGAGGAGGACGGCTGTTCATGCCGGTTCCCAGAGGAGGAGGAAGGC |
| | | GGCTGCGAACTGCGCGTGAAATTCAGCCGCAGCGCAGATGCTCCAGCC |
| | | TACAAGCAGGGGCAGAACCAGCTCTACAACGAACTCAATCTTGGTCGG |
| | | AGAGAGGAGTACGACGTGCTGGACAAGCGGAGAGGACGGGACCCAGAA |
| | | ATGGGCGGGAAGCCGCGCAGAAAGAATCCCCAAGAGGGCCTGTACAAC |
| | | GAGCTCCAAAAGGATAAGATGGCAGAAGCCTATAGCGAGATTGGTATG |
| | | AAAGGGGAACGCAGAAGAGGCAAAGGCCACGACGGACTGTACCAGGGA |
| | | CTCAGCACCGCCACCAAGGACACCTATGACGCTCTTCACATGCAGGCC |
| | | CTGCCGCCTCGG |

139114

| | | |
|---|---|---|
| 139114-aa | 1485 | EVQLVESGGGLVQPGGSLRLSCAVSGFALSNHGMSWVRRAPGKGLEWV |
| ScFv | | SGIVYSGSTYYAASVKGRFTISRDNSRNTLYLQMNSLRPEDTAIYYCS |
| domain | | AHGGESDVWGQGTTVTVSSASGGGGSGGRASGGGGSEIVLTQSPGTLS |
| | | LSPGERATLSCRASQSIGSSSLAWYQQKPGQAPRLLMYGASSRASGIP |
| | | DRFSGSGSGTDFTLTISRLEPEDFAVYYCQQYAGSPPFTFGQGTKVEI |
| | | K |
| 139114-nt | 1486 | GAAGTGCAATTGGTGGAATCTGGTGGAGGACTTGTGCAACCTGGAGGA |
| ScFv | | TCACTGAGACTGTCATGCGCGGTGTCCGGTTTTGCCCTGAGCAATCAT |
| domain | | GGGATGTCGTGGGTCCGGCGCGCCCCCGGAAAGGGTCTGGAATGGGTG |
| | | TCGGGTATCGTCTACTCCGGGAGCACTTACTACGCCGCGAGCGTGAAG |
| | | GGCCGCTTCACCATTTCCCGCGATAACTCCCGCAACACCCTGTACTTG |
| | | CAAATGAACTCGCTCCGGCCTGAGGACACTGCCATCTACTACTGCTCC |
| | | GCACACGGAGGAGAATCCGACGTGTGGGGCCAGGGAACTACCGTGACC |
| | | GTCAGCAGCGCCTCCGGCGGCGGGGGCTCAGGCGGACGGGCTAGCGGC |
| | | GGCGGTGGCTCCGAGATCGTGCTGACCCAGTCGCCTGGCACTCTCTCG |
| | | CTGAGCCCCGGGGAAAGGGCAACCCTGTCCTGTCGGGCCAGCCAGTCC |
| | | ATTGGATCATCCTCCCTCGCCTGGTATCAGCAGAAACCGGGACAGGCT |
| | | CCGCGGCTGCTTATGTATGGGGCCAGCTCAAGAGCCTCCGGCATTCCC |
| | | GACCGGTTCTCCGGGTCCGGTTCCGGCACCGATTTCACCCTGACTATC |
| | | TCGAGGCTGGAGCCAGAGGACTTCGCCGTGTACTACTGCCAGCAGTAC |
| | | GCGGGGTCCCCGCCGTTCACGTTCGGACAGGGAACCAAGGTCGAGATC |
| | | AAG |
| 139114-aa | 1487 | EVQLVESGGGLVQPGGSLRLSCAVSGFALSNHGMSWVRRAPGKGLEWV |
| VH | | SGIVYSGSTYYAASVKGRFTISRDNSRNTLYLQMNSLRPEDTAIYYCS |
| | | AHGGESDVWGQGTTVTVSS |
| 139114-aa | 1488 | EIVLTQSPGTLSLSPGERATLSCRASQSIGSSSLAWYQQKPGQAPRLL |
| VL | | MYGASSRASGIPDRFSGSGSGTDFTLTISRLEPEDFAVYYCQQYAGSP |
| | | PFTFGQGTKVEIK |
| 139114-aa | 1489 | MALPVTALLLPLALLLHAARPEVQLVESGGGLVQPGGSLRLSCAVSGF |
| Full CAR | | ALSNHGMSWVRRAPGKGLEWVSGIVYSGSTYYAASVKGRFTISRDNSR |
| | | NTLYLQMNSLRPEDTAIYYCSAHGGESDVWGQGTTVTVSSASGGGGSG |
| | | GRASGGGGSEIVLTQSPGTLSLSPGERATLSCRASQSIGSSSLAWYQQ |
| | | KPGQAPRLLMYGASSRASGIPDRFSGSGSGTDFTLTISRLEPEDFAVY |
| | | YCQQYAGSPPFTFGQGTKVEIKTTTPAPRPPTPAPTIASQPLSLRPEA |
| | | CRPAAGGAVHTRGLDFACDIYIWAPLAGTCGVLLLSLVITLYCKRGRK |
| | | KLLYIFKQPFMRPVQTTQEEDGCSCRFPEEEEGGCELRVKFSRSADAP |
| | | AYKQGQNQLYNELNLGRREEYDVLDKRRGRDPEMGGKPRRKNPQEGLY |
| | | NELQKDKMAEAYSEIGMKGERRRGKGHDGLYQGLSTATKDTYDALHMQ |
| | | ALPPR |
| 139114-nt | 1490 | ATGGCCCTCCCTGTCACCGCCCTGCTGCTTCCGCTGGCTCTTCTGCTC |
| Full CAR | | CACGCCGCTCGGCCCGAAGTGCAATTGGTGGAATCTGGTGGAGGACTT |
| | | GTGCAACCTGGAGGATCACTGAGACTGTCATGCGCGGTGTCCGGTTTT |
| | | GCCCTGAGCAATCATGGGATGTCGTGGGTCCGGCGCGCCCCCGGAAAG |
| | | GGTCTGGAATGGGTGTCGGGTATCGTCTACTCCGGGAGCACTTACTAC |
| | | GCCGCGAGCGTGAAGGGCCGCTTCACCATTTCCCGCGATAACTCCCGC |
| | | AACACCCTGTACTTGCAAATGAACTCGCTCCGGCCTGAGGACACTGCC |
| | | ATCTACTACTGCTCCGCACACGGAGGAGAATCCGACGTGTGGGGCCAG |
| | | GGAACTACCGTGACCGTCAGCAGCGCCTCCGGCGGCGGGGGCTCAGGC |
| | | GGACGGGCTAGCGGCGGCGGTGGCTCCGAGATCGTGCTGACCCAGTCG |
| | | CCTGGCACTCTCTCGCTGAGCCCCGGGGAAAGGGCAACCCTGTCCTGT |
| | | CGGGCCAGCCAGTCCATTGGATCATCCTCCCTCGCCTGGTATCAGCAG |
| | | AAACCGGGACAGGCTCCGCGGCTGCTTATGTATGGGGCCAGCTCAAGA |
| | | GCCTCCGGCATTCCCGACCGGTTCTCCGGGTCCGGTTCCGGCACCGAT |
| | | TTCACCCTGACTATCTCGAGGCTGGAGCCAGAGGACTTCGCCGTGTAC |
| | | TACTGCCAGCAGTACGCGGGGTCCCCGCCGTTCACGTTCGGACAGGGA |
| | | ACCAAGGTCGAGATCAAGACCACTACCCCAGCACCGAGGCCACCCACC |
| | | CCGGCTCCTACCATCGCCTCCCAGCCTCTGTCCCTGCGTCCGGAGGCA |
| | | TGTAGACCCGCAGCTGGTGGGGCCGTGCATACCCGGGGTCTTGACTTC |
| | | GCCTGCGATATCTACATTTGGGCCCCTCTGGCTGGTACTTGCGGGGTC |
| | | CTGCTGCTTTCACTCGTGATCACTCTTTACTGTAAGCGCGGTCGGAAG |
| | | AAGCTGCTGTACATCTTTAAGCAACCCTTCATGAGGCCTGTGCAGACT |
| | | ACTCAAGAGGAGGACGGCTGTTCATGCCGGTTCCCAGAGGAGGAGGAA |
| | | GGCGGCTGCGAACTGCGCGTGAAATTCAGCCGCAGCGCAGATGCTCCA |
| | | GCCTACAAGCAGGGGCAGAACCAGCTCTACAACGAACTCAATCTTGGT |
| | | CGGAGAGAGGAGTACGACGTGCTGGACAAGCGGAGAGGACGGGACCCA |
| | | GAAATGGGCGGGAAGCCGCGCAGAAAGAATCCCCAAGAGGGCCTGTAC |
| | | AACGAGCTCCAAAAGGATAAGATGGCAGAAGCCTATAGCGAGATTGGT |
| | | ATGAAAGGGGAACGCAGAAGAGGCAAAGGCCACGACGGACTGTACCAG |
| | | GGACTCAGCACCGCCACCAAGGACACCTATGACGCTCTTCACATGCAG |
| | | GCCCTGCCGCCTCGG |

149362

| | | |
|---|---|---|
| 149362-aa | 1491 | QVQLQESGPGLVKPSETLSLTCTVSGGSISSSYYYWGWIRQPPGKGLE |
| ScFv | | WIGSIYYSGSAYYNPSLKSRVTISVDTSKNQFSLRLSSVTAADTAVYY |
| domain | | CARHWQEWPDAFDIWGQGTMVTVSSGGGGSGGGGSGGGGSETTLTQSP |
| | | AFMSATPGDKVIISCKASQDIDDAMNWYQQKPGEAPLFIIQSATSPVP |
| | | GIPPRFSGSGFGTDFSLTINNIESEDAAYYFCLQHDNFPLTFGQGTKL |
| | | EIK |
| 149362-nt | 1492 | CAAGTGCAGCTTCAGGAAAGCGGACCGGGCCTGGTCAAGCCATCCGAA |
| ScFv | | ACTCTCTCCCTGACTTGCACTGTGTCTGGCGGTTCCATCTCATCGTCG |
| domain | | TACTACTACTGGGGCTGGATTAGGCAGCCGCCCGGAAAGGGACTGGAG |
| | | TGGATCGGAAGCATCTACTATTCCGGCTCGGCGTACTACAACCCTAGC |
| | | CTCAAGTCGAGAGTGACCATCTCCGTGGATACCTCCAAGAACCAGTTT |
| | | TCCCTGCGCCTGAGCTCCGTGACCGCCGCTGACACCGCCGTGTACTAC |
| | | TGTGCTCGGCATTGGCAGGAATGGCCCGATGCCTTCGACATTTGGGGC |
| | | CAGGGCACTATGGTCACTGTGTCATCCGGGGGTGGAGGCAGCGGGGGA |
| | | GGAGGGTCCGGGGGGGGAGGTTCAGAGACAACCTTGACCCAGTCACCC |
| | | GCATTCATGTCCGCCACTCCGGGAGACAAGGTCATCATCTCGTGCAAA |
| | | GCGTCCCAGGATATCGACGATGCCATGAATTGGTACCAGCAGAAGCCT |
| | | GGCGAAGCGCCGCTGTTCATTATCCAATCCGCAACCTCGCCCGTGCCT |
| | | GGAATCCCACCGCGGTTCAGCGGCAGCGGTTTCGGAACCGACTTTTCC |
| | | CTGACCATTAACAACATTGAGTCCGAGGACGCCGCCTACTACTTCTGC |
| | | CTGCAACACGACAACTTCCCTCTCACGTTCGGCCAGGGAACCAAGCTG |
| | | GAAATCAAG |
| 149362-aa | 1493 | QVQLQESGPGLVKPSETLSLTCTVSGGSISSSYYYWGWIRQPPGKGLE |
| VH | | WIGSIYYSGSAYYNPSLKSRVTISVDTSKNQFSLRLSSVTAADTAVYY |
| | | CARHWQEWPDAFDIWGQGTMVTVSS |
| 149362-aa | 1494 | ETTLTQSPAFMSATPGDKVIISCKASQDIDDAMNWYQQKPGEAPLFII |
| VL | | QSATSPVPGIPPRFSGSGFGTDFSLTINNIESEDAAYYFCLQHDNFPL |
| | | TFGQGTKLEIK |
| 149362-aa | 1495 | MALPVTALLLPLALLLHAARPQVQLQESGPGLVKPSETLSLTCTVSGG |
| Full CAR | | SISSSYYYWGWIRQPPGKGLEWIGSIYYSGSAYYNPSLKSRVTISVDT |
| | | SKNQFSLRLSSVTAADTAVYYCARHWQEWPDAFDIWGQGTMVTVSSGG |
| | | GGSGGGGSGGGGSETTLTQSPAFMSATPGDKVIISCKASQDIDDAMNW |
| | | YQQKPGEAPLFIIQSATSPVPGIPPRFSGSGFGTDFSLTINNIESEDA |
| | | AYYFCLQHDNFPLTFGQGTKLEIKTTTPAPRPPTPAPTIASQPLSLRP |
| | | EACRPAAGGAVHTRGLDFACDIYIWAPLAGTCGVLLLSLVITLYCKRG |
| | | RKKLLYIFKQPFMRPVQTTQEEDGCSCRFPEEEEGGCELRVKFSRSAD |
| | | APAYKQGQNQLYNELNLGRREEYDVLDKRRGRDPEMGGKPRRKNPQEG |
| | | LYNELQKDKMAEAYSEIGMKGERRRGKGHDGLYQGLSTATKDTYDALH |
| | | MQALPPR |
| 149362-nt | 1496 | ATGGCCCTCCCTGTCACCGCCCTGCTGCTTCCGCTGGCTCTTCTGCTC |
| Full CAR | | CACGCCGCTCGGCCCCAAGTGCAGCTTCAGGAAAGCGGACCGGGCCTG |
| | | GTCAAGCCATCCGAAACTCTCTCCCTGACTTGCACTGTGTCTGGCGGT |
| | | TCCATCTCATCGTCGTACTACTACTGGGGCTGGATTAGGCAGCCGCCC |
| | | GGAAAGGGACTGGAGTGGATCGGAAGCATCTACTATTCCGGCTCGGCG |
| | | TACTACAACCCTAGCCTCAAGTCGAGAGTGACCATCTCCGTGGATACC |
| | | TCCAAGAACCAGTTTTCCCTGCGCCTGAGCTCCGTGACCGCCGCTGAC |
| | | ACCGCCGTGTACTACTGTGCTCGGCATTGGCAGGAATGGCCCGATGCC |
| | | TTCGACATTTGGGGCCAGGGCACTATGGTCACTGTGTCATCCGGGGGT |
| | | GGAGGCAGCGGGGGAGGAGGGTCCGGGGGGGGAGGTTCAGAGACAACC |
| | | TTGACCCAGTCACCCGCATTCATGTCCGCCACTCCGGGAGACAAGGTC |
| | | ATCATCTCGTGCAAAGCGTCCCAGGATATCGACGATGCCATGAATTGG |
| | | TACCAGCAGAAGCCTGGCGAAGCGCCGCTGTTCATTATCCAATCCGCA |
| | | ACCTCGCCCGTGCCTGGAATCCCACCGCGGTTCAGCGGCAGCGGTTTC |
| | | GGAACCGACTTTTCCCTGACCATTAACAACATTGAGTCCGAGGACGCC |
| | | GCCTACTACTTCTGCCTGCAACACGACAACTTCCCTCTCACGTTCGGC |
| | | CAGGGAACCAAGCTGGAAATCAAGACCACTACCCCAGCACCGAGGCCA |
| | | CCCACCCCGGCTCCTACCATCGCCTCCCAGCCTCTGTCCCTGCGTCCG |
| | | GAGGCATGTAGACCCGCAGCTGGTGGGGCCGTGCATACCCGGGGTCTT |
| | | GACTTCGCCTGCGATATCTACATTTGGGCCCCTCTGGCTGGTACTTGC |
| | | GGGGTCCTGCTGCTTTCACTCGTGATCACTCTTTACTGTAAGCGCGGT |
| | | CGGAAGAAGCTGCTGTACATCTTTAAGCAACCCTTCATGAGGCCTGTG |
| | | CAGACTACTCAAGAGGAGGACGGCTGTTCATGCCGGTTCCCAGAGGAG |
| | | GAGGAAGGCGGCTGCGAACTGCGCGTGAAATTCAGCCGCAGCGCAGAT |
| | | GCTCCAGCCTACAAGCAGGGGCAGAACCAGCTCTACAACGAACTCAAT |
| | | CTTGGTCGGAGAGAGGAGTACGACGTGCTGGACAAGCGGAGAGGACGG |
| | | GACCCAGAAATGGGCGGGAAGCCGCGCAGAAAGAATCCCCAAGAGGGC |
| | | CTGTACAACGAGCTCCAAAAGGATAAGATGGCAGAAGCCTATAGCGAG |
| | | ATTGGTATGAAAGGGGAACGCAGAAGAGGCAAAGGCCACGACGGACTG |
| | | TACCAGGGACTCAGCACCGCCACCAAGGACACCTATGACGCTCTTCAC |
| | | ATGCAGGCCCTGCCGCCTCGG |

149363

| | | |
|---|---|---|
| 149363-aa | 1497 | VNLRESGPALVKPTQTLTLTCTFSGFSLRTSGMCVSWIRQPPGKALEW |
| ScFv | | LARIDWDEDKFYSTSLKTRLTISKDTSDNQVVLRMTNMDPADTATYYC |
| domain | | ARSGAGGTSATAFDIWGPGTMVTVSSGGGGSGGGGSGGGGSDIQMTQS |
| | | PSSLSASVGDRVTITCRASQDIYNNLAWFQLKPGSAPRSLMYAANKSQ |
| | | SGVPSRFSGSASGTDFTLTISSLQPEDFATYYCQHYYRFPYSFGQGTK |
| | | LEIK |
| 149363-nt | 1498 | CAAGTCAATCTGCGCGAATCCGGCCCCGCCTTGGTCAAGCCTACCCAG |
| ScFv | | ACCCTCACTCTGACCTGTACTTTCTCCGGCTTCTCCCTGCGGACTTCC |
| domain | | GGGATGTGCGTGTCCTGGATCAGACAGCCTCCGGGAAAGGCCCTGGAG |
| | | TGGCTCGCTCGCATTGACTGGGATGAGGACAAGTTCTACTCCACCTCA |
| | | CTCAAGACCAGGCTGACCATCAGCAAAGATACCTCTGACAACCAAGTG |
| | | GTGCTCCGCATGACCAACATGGACCCAGCCGACACTGCCACTTACTAC |
| | | TGCGCGAGGAGCGGAGCGGGCGGAACCTCCGCCACCGCCTTCGATATT |
| | | TGGGGCCCGGGTACCATGGTCACCGTGTCAAGCGGAGGAGGGGGGTCC |
| | | GGGGGCGGCGGTTCCGGGGGAGGCGGATCGGACATTCAGATGACTCAG |
| | | TCACCATCGTCCCTGAGCGCTAGCGTGGGCGACAGAGTGACAATCACT |
| | | TGCCGGGCATCCCAGGACATCTATAACAACCTTGCGTGGTTCCAGCTG |
| | | AAGCCTGGTTCCGCACCGCGGTCACTTATGTACGCCGCCAACAAGAGC |
| | | CAGTCGGGAGTGCCGTCCCGGTTTTCCGGTTCGGCCTCGGGAACTGAC |
| | | TTCACCCTGACGATCTCCAGCCTGCAACCCGAGGATTTCGCCACCTAC |
| | | TACTGCCAGCACTACTACCGCTTTCCCTACTCGTTCGGACAGGGAACC |
| | | AAGCTGGAAATCAAG |
| 149363-aa | 1499 | QVNLRESGPALVKPTQTLTLTCTFSGFSLRTSGMCVSWIRQPPGKALE |
| VH | | WLARIDWDEDKFYSTSLKTRLTISKDTSDNQVVLRMTNMDPADTATYY |
| | | CARSGAGGTSATAFDIWGPGTMVTVSS |
| 149363-aa | 1500 | DIQMTQSPSSLSASVGDRVTITCRASQDIYNNLAWFQLKPGSAPRSLM |
| VL | | YAANKSQSGVPSRFSGSASGTDFTLTISSLQPEDFATYYCQHYYRFPY |
| | | SFGQGTKLEIK |
| 149363-aa | 1501 | MALPVTALLLPLALLLHAARPQVNLRESGPALVKPTQTLTLTCTFSGF |
| Full CAR | | SLRTSGMCVSWIRQPPGKALEWLARIDWDEDKFYSTSLKTRLTISKDT |
| | | SDNQVVLRMTNMDPADTATYYCARSGAGGTSATAFDIWGPGTMVTVSS |
| | | GGGGSGGGGSGGGGSDIQMTQSPSSLSASVGDRVTITCRASQDIYNNL |
| | | AWFQLKPGSAPRSLMYAANKSQSGVPSRFSGSASGTDFTLTISSLQPE |
| | | DFATYYCQHYYRFPYSFGQGTKLEIKTTTPAPRPPTPAPTIASQPLSL |
| | | RPEACRPAAGGAVHTRGLDFACDIYIWAPLAGTCGVLLLSLVITLYCK |
| | | RGRKKLLYIFKQPFMRPVQTTQEEDGCSCRFPEEEEGGCELRVKFSRS |
| | | ADAPAYKQGQNQLYNELNLGRREEYDVLDKRRGRDPEMGGKPRRKNPQ |
| | | EGLYNELQKDKMAEAYSEIGMKGERRRGKGHDGLYQGLSTATKDTYDA |
| | | LHMQALPPR |
| 149363-nt | 1502 | ATGGCCCTCCCTGTCACCGCCCTGCTGCTTCCGCTGGCTCTTCTGCTC |
| Full CAR | | CACGCCGCTCGGCCCCAAGTCAATCTGCGCGAATCCGGCCCCGCCTTG |
| | | GTCAAGCCTACCCAGACCCTCACTCTGACCTGTACTTTCTCCGGCTTC |
| | | TCCCTGCGGACTTCCGGGATGTGCGTGTCCTGGATCAGACAGCCTCCG |
| | | GGAAAGGCCCTGGAGTGGCTCGCTCGCATTGACTGGGATGAGGACAAG |
| | | TTCTACTCCACCTCACTCAAGACCAGGCTGACCATCAGCAAAGATACC |
| | | TCTGACAACCAAGTGGTGCTCCGCATGACCAACATGGACCCAGCCGAC |
| | | ACTGCCACTTACTACTGCGCGAGGAGCGGAGCGGGCGGAACCTCCGCC |
| | | ACCGCCTTCGATATTTGGGGCCCGGGTACCATGGTCACCGTGTCAAGC |
| | | GGAGGAGGGGGGTCCGGGGGCGGCGGTTCCGGGGGAGGCGGATCGGAC |
| | | ATTCAGATGACTCAGTCACCATCGTCCCTGAGCGCTAGCGTGGGCGAC |
| | | AGAGTGACAATCACTTGCCGGGCATCCCAGGACATCTATAACAACCTT |
| | | GCGTGGTTCCAGCTGAAGCCTGGTTCCGCACCGCGGTCACTTATGTAC |
| | | GCCGCCAACAAGAGCCAGTCGGGAGTGCCGTCCCGGTTTTCCGGTTCG |
| | | GCCTCGGGAACTGACTTCACCCTGACGATCTCCAGCCTGCAACCCGAG |
| | | GATTTCGCCACCTACTACTGCCAGCACTACTACCGCTTTCCCTACTCG |
| | | TTCGGACAGGGAACCAAGCTGGAAATCAAGACCACTACCCCAGCACCG |
| | | AGGCCACCCACCCCGGCTCCTACCATCGCCTCCCAGCCTCTGTCCCTG |
| | | CGTCCGGAGGCATGTAGACCCGCAGCTGGTGGGGCCGTGCATACCCGG |
| | | GGTCTTGACTTCGCCTGCGATATCTACATTTGGGCCCCTCTGGCTGGT |
| | | ACTTGCGGGGTCCTGCTGCTTTCACTCGTGATCACTCTTTACTGTAAG |
| | | CGCGGTCGGAAGAAGCTGCTGTACATCTTTAAGCAACCCTTCATGAGG |
| | | CCTGTGCAGACTACTCAAGAGGAGGACGGCTGTTCATGCCGGTTCCCA |
| | | GAGGAGGAGGAAGGCGGCTGCGAACTGCGCGTGAAATTCAGCCGCAGC |
| | | GCAGATGCTCCAGCCTACAAGCAGGGGCAGAACCAGCTCTACAACGAA |
| | | CTCAATCTTGGTCGGAGAGAGGAGTACGACGTGCTGGACAAGCGGAGA |
| | | GGACGGGACCCAGAAATGGGCGGGAAGCCGCGCAGAAAGAATCCCCAA |
| | | GAGGGCCTGTACAACGAGCTCCAAAAGGATAAGATGGCAGAAGCCTAT |
| | | AGCGAGATTGGTATGAAAGGGGAACGCAGAAGAGGCAAAGGCCACGAC |
| | | GGACTGTACCAGGGACTCAGCACCGCCACCAAGGACACCTATGACGCT |
| | | CTTCACATGCAGGCCCTGCCGCCTCGG |

149364

| | | |
|---|---|---|
| 149364-aa | 1503 | EVQLVESGGGLVKPGGSLRLSCAASGFTFSSYSMNWVRQAPGKGLEWV |
| ScFv | | SSISSSSSYIYYADSVKGRFTISRDNAKNSLYLQMNSLRAEDTAVYYC |
| domain | | AKTIAAVYAFDIWGQGTTVTVSSGGGGSGGGGSGGGGSEIVLTQSPLS |
| | | LPVTPEEPASISCRSSQSLLHSNGYNYLDWYLQKPGQSPQLLIYLGSN |
| | | RASGVPDRFSGSGSGTDFTLKISRVEAEDVGVYYCMQALQTPYTFGQG |
| | | TKLEIK |
| 149364-nt | 1504 | GAAGTGCAGCTTGTCGAATCCGGGGGGGGACTGGTCAAGCCGGGCGGA |
| ScFv | | TCACTGAGACTGTCCTGCGCCGCGAGCGGCTTCACGTTCTCCTCCTAC |
| domain | | TCCATGAACTGGGTCCGCCAAGCCCCCGGGAAGGGACTGGAATGGGTG |
| | | TCCTCTATCTCCTCGTCGTCGTCCTACATCTACTACGCCGACTCCGTG |
| | | AAGGGAAGATTCACCATTTCCCGCGACAACGCAAAGAACTCACTGTAC |
| | | TTGCAAATGAACTCACTCCGGGCCGAAGATACTGCTGTGTACTATTGC |
| | | GCCAAGACTATTGCCGCCGTCTACGCTTTCGACATCTGGGGCCAGGGA |
| | | ACCACCGTGACTGTGTCGTCCGGTGGTGGTGGCTCGGGCGGAGGAGGA |
| | | AGCGGCGGCGGGGGGTCCGAGATTGTGCTGACCCAGTCGCCACTGAGC |
| | | CTCCCTGTGACCCCCGAGGAACCCGCCAGCATCAGCTGCCGGTCCAGC |
| | | CAGTCCCTGCTCCACTCCAACGGATACAATTACCTCGATTGGTACCTT |
| | | CAGAAGCCTGGACAAAGCCCGCAGCTGCTCATCTACTTGGGATCAAAC |
| | | CGCGCGTCAGGAGTGCCTGACCGGTTCTCCGGCTCGGGCAGCGGTACC |
| | | GATTTCACCCTGAAAATCTCCAGGGTGGAGGCAGAGGACGTGGGAGTG |
| | | TATTACTGTATGCAGGCGCTGCAGACTCCGTACACATTTGGGCAGGGC |
| | | ACCAAGCTGGAGATCAAG |
| 149364-aa | 1505 | EVQLVESGGGLVKPGGSLRLSCAASGFTFSSYSMNWVRQAPGKGLEWV |
| VH | | SSISSSSSYIYYADSVKGRFTISRDNAKNSLYLQMNSLRAEDTAVYYC |
| | | AKTIAAVYAFDIWGQGTTVTVSS |
| 149364-aa | 1506 | EIVLTQSPLSLPVTPEEPASISCRSSQSLLHSNGYNYLDWYLQKPGQS |
| VL | | PQLLIYLGSNRASGVPDRFSGSGSGTDFTLKISRVEAEDVGVYYCMQA |
| | | LQTPYTFGQGTKLEIK |
| 149364-aa | 1507 | MALPVTALLLPLALLLHAARPEVQLVESGGGLVKPGGSLRLSCAASGF |
| Full CAR | | TFSSYSMNWVRQAPGKGLEWVSSISSSSSYIYYADSVKGRFTISRDNA |
| | | KNSLYLQMNSLRAEDTAVYYCAKTIAAVYAFDIWGQGTTVTVSSGGGG |
| | | SGGGGSGGGGSEIVLTQSPLSLPVTPEEPASISCRSSQSLLHSNGYNY |
| | | LDWYLQKPGQSPQLLIYLGSNRASGVPDRFSGSGSGTDFTLKISRVEA |
| | | EDVGVYYCMQALQTPYTFGQGTKLEIKTTTPAPRPPTPAPTIASQPLS |
| | | LRPEACRPAAGGAVHTRGLDFACDIYIWAPLAGTCGVLLLSLVITLYC |
| | | KRGRKKLLYIFKQPFMRPVQTTQEEDGCSCRFPEEEEGGCELRVKFSR |
| | | SADAPAYKQGQNQLYNELNLGRREEYDVLDKRRGRDPEMGGKPRRKNP |
| | | QEGLYNELQKDKMAEAYSEIGMKGERRRGKGHDGLYQGLSTATKDTYD |
| | | ALHMQALPPR |
| 149364-nt | 1508 | ATGGCCCTCCCTGTCACCGCCCTGCTGCTTCCGCTGGCTCTTCTGCTC |
| Full CAR | | CACGCCGCTCGGCCCGAAGTGCAGCTTGTCGAATCCGGGGGGGGACTG |
| | | GTCAAGCCGGGCGGATCACTGAGACTGTCCTGCGCCGCGAGCGGCTTC |
| | | ACGTTCTCCTCCTACTCCATGAACTGGGTCCGCCAAGCCCCCGGGAAG |
| | | GGACTGGAATGGGTGTCCTCTATCTCCTCGTCGTCGTCCTACATCTAC |
| | | TACGCCGACTCCGTGAAGGGAAGATTCACCATTTCCCGCGACAACGCA |
| | | AAGAACTCACTGTACTTGCAAATGAACTCACTCCGGGCCGAAGATACT |
| | | GCTGTGTACTATTGCGCCAAGACTATTGCCGCCGTCTACGCTTTCGAC |
| | | ATCTGGGGCCAGGGAACCACCGTGACTGTGTCGTCCGGTGGTGGTGGC |
| | | TCGGGCGGAGGAGGAAGCGGCGGCGGGGGGTCCGAGATTGTGCTGACC |
| | | CAGTCGCCACTGAGCCTCCCTGTGACCCCCGAGGAACCCGCCAGCATC |
| | | AGCTGCCGGTCCAGCCAGTCCCTGCTCCACTCCAACGGATACAATTAC |
| | | CTCGATTGGTACCTTCAGAAGCCTGGACAAAGCCCGCAGCTGCTCATC |
| | | TACTTGGGATCAAACCGCGCGTCAGGAGTGCCTGACCGGTTCTCCGGC |
| | | TCGGGCAGCGGTACCGATTTCACCCTGAAAATCTCCAGGGTGGAGGCA |
| | | GAGGACGTGGGAGTGTATTACTGTATGCAGGCGCTGCAGACTCCGTAC |
| | | ACATTTGGGCAGGGCACCAAGCTGGAGATCAAGACCACTACCCCAGCA |
| | | CCGAGGCCACCCACCCCGGCTCCTACCATCGCCTCCCAGCCTCTGTCC |
| | | CTGCGTCCGGAGGCATGTAGACCCGCAGCTGGTGGGGCCGTGCATACC |
| | | CGGGGTCTTGACTTCGCCTGCGATATCTACATTTGGGCCCCTCTGGCT |
| | | GGTACTTGCGGGGTCCTGCTGCTTTCACTCGTGATCACTCTTTACTGT |
| | | AAGCGCGGTCGGAAGAAGCTGCTGTACATCTTTAAGCAACCCTTCATG |
| | | AGGCCTGTGCAGACTACTCAAGAGGAGGACGGCTGTTCATGCCGGTTC |
| | | CCAGAGGAGGAGGAAGGCGGCTGCGAACTGCGCGTGAAATTCAGCCGC |
| | | AGCGCAGATGCTCCAGCCTACAAGCAGGGGCAGAACCAGCTCTACAAC |
| | | GAACTCAATCTTGGTCGGAGAGAGGAGTACGACGTGCTGGACAAGCGG |
| | | AGAGGACGGGACCCAGAAATGGGCGGGAAGCCGCGCAGAAAGAATCCC |
| | | CAAGAGGGCCTGTACAACGAGCTCCAAAAGGATAAGATGGCAGAAGCC |
| | | TATAGCGAGATTGGTATGAAAGGGGAACGCAGAAGAGGCAAAGGCCAC |
| | | GACGGACTGTACCAGGGACTCAGCACCGCCACCAAGGACACCTATGAC |
| | | GCTCTTCACATGCAGGCCCTGCCGCCTCGG |

149365

| | | |
|---|---|---|
| 149365-aa | 1509 | EVQLVESGGGLVKPGGSLRLSCAASGFTFSDYYMSWIRQAPGKGLEWV |
| ScFv | | SYISSSGSTIYYADSVKGRFTISRDNAKNSLYLQMNSLRAEDTAVYYC |
| domain | | ARDLRGAFDIWGQGTMVTVSSGGGGSGGGGSGGGGSSYVLTQSPSVSA |
| | | APGYTATISCGGNNIGTKSVHWYQQKPGQAPLLVIRDDSVRPSKIPGR |
| | | FSGSNSGNMATLTISGVQAGDEADFYCQVWDSDSEHVVFGGGTKLTVL |
| 149365-nt | 1510 | GAAGTCCAGCTCGTGGAGTCCGGCGGAGGCCTTGTGAAGCCTGGAGGT |
| ScFv | | TCGCTGAGACTGTCCTGCGCCGCCTCCGGCTTCACCTTCTCCGACTAC |
| domain | | TACATGTCCTGGATCAGACAGGCCCCGGGAAAGGGCCTGGAATGGGTG |
| | | TCCTACATCTCGTCATCGGGCAGCACTATCTACTACGCGGACTCAGTG |
| | | AAGGGGCGGTTCACCATTTCCCGGGATAACGCGAAGAACTCGCTGTAT |
| | | CTGCAAATGAACTCACTGAGGGCCGAGGACACCGCCGTGTACTACTGC |
| | | GCCCGCGATCTCCGCGGGGCATTTGACATCTGGGGACAGGGAACCATG |
| | | GTCACAGTGTCCAGCGGAGGGGGAGGATCGGGTGGCGGAGGTTCCGGG |
| | | GGTGGAGGCTCCTCCTACGTGCTGACTCAGAGCCCAAGCGTCAGCGCT |
| | | GCGCCCGGTTACACGGCAACCATCTCCTGTGGCGGAAACAACATTGGG |
| | | ACCAAGTCTGTGCACTGGTATCAGCAGAAGCCGGGCCAAGCTCCCCTG |
| | | TTGGTGATCCGCGATGACTCCGTGCGGCCTAGCAAAATTCCGGGACGG |
| | | TTCTCCGGCTCCAACAGCGGCAATATGGCCACTCTCACCATCTCGGGA |
| | | GTGCAGGCCGGAGATGAAGCCGACTTCTACTGCCAAGTCTGGGACTCA |
| | | GACTCCGAGCATGTGGTGTTCGGGGGCGGAACCAAGCTGACTGTGCTC |
| 149365-aa | 1511 | EVQLVESGGGLVKPGGSLRLSCAASGFTFSDYYMSWIRQAPGKGLEWV |
| VH | | SYISSSGSTIYYADSVKGRFTISRDNAKNSLYLQMNSLRAEDTAVYYC |
| | | ARDLRGAFDIWGQGTMVTVSS |
| 149365-aa | 1512 | SYVLTQSPSVSAAPGYTATISCGGNNIGTKSVHWYQQKPGQAPLLVIR |
| VL | | DDSVRPSKIPGRFSGSNSGNMATLTISGVQAGDEADFYCQVWDSDSEH |
| | | VVFGGGTKLTVL |
| 149365-aa | 1513 | MALPVTALLLPLALLLHAARPEVQLVESGGGLVKPGGSLRLSCAASGF |
| Full CAR | | TFSDYYMSWIRQAPGKGLEWVSYISSSGSTIYYADSVKGRFTISRDNA |
| | | KNSLYLQMNSLRAEDTAVYYCARDLRGAFDIWGQGTMVTVSSGGGGSG |
| | | GGGSGGGGSSYVLTQSPSVSAAPGYTATISCGGNNIGTKSVHWYQQKP |
| | | GQAPLLVIRDDSVRPSKIPGRFSGSNSGNMATLTISGVQAGDEADFYC |
| | | QVWDSDSEHVVFGGGTKLTVLTTTPAPRPPTPAPTIASQPLSLRPEAC |
| | | RPAAGGAVHTRGLDFACDIYIWAPLAGTCGVLLLSLVITLYCKRGRKK |
| | | LLYIFKQPFMRPVQTTQEEDGCSCRFPEEEEGGCELRVKFSRSADAPA |
| | | YKQGQNQLYNELNLGRREEYDVLDKRRGRDPEMGGKPRRKNPQEGLYN |
| | | ELQKDKMAEAYSEIGMKGERRRGKGHDGLYQGLSTATKDTYDALHMQA |
| | | LPPR |
| 149365-nt | 1514 | ATGGCCCTCCCTGTCACCGCCCTGCTGCTTCCGCTGGCTCTTCTGCTC |
| Full CAR | | CACGCCGCTCGGCCCGAAGTCCAGCTCGTGGAGTCCGGCGGAGGCCTT |
| | | GTGAAGCCTGGAGGTTCGCTGAGACTGTCCTGCGCCGCCTCCGGCTTC |
| | | ACCTTCTCCGACTACTACATGTCCTGGATCAGACAGGCCCCGGGAAAG |
| | | GGCCTGGAATGGGTGTCCTACATCTCGTCATCGGGCAGCACTATCTAC |
| | | TACGCGGACTCAGTGAAGGGGCGGTTCACCATTTCCCGGGATAACGCG |
| | | AAGAACTCGCTGTATCTGCAAATGAACTCACTGAGGGCCGAGGACACC |
| | | GCCGTGTACTACTGCGCCCGCGATCTCCGCGGGGCATTTGACATCTGG |
| | | GGACAGGGAACCATGGTCACAGTGTCCAGCGGAGGGGGAGGATCGGGT |
| | | GGCGGAGGTTCCGGGGGTGGAGGCTCCTCCTACGTGCTGACTCAGAGC |
| | | CCAAGCGTCAGCGCTGCGCCCGGTTACACGGCAACCATCTCCTGTGGC |
| | | GGAAACAACATTGGGACCAAGTCTGTGCACTGGTATCAGCAGAAGCCG |
| | | GGCCAAGCTCCCCTGTTGGTGATCCGCGATGACTCCGTGCGGCCTAGC |
| | | AAAATTCCGGGACGGTTCTCCGGCTCCAACAGCGGCAATATGGCCACT |
| | | CTCACCATCTCGGGAGTGCAGGCCGGAGATGAAGCCGACTTCTACTGC |
| | | CAAGTCTGGGACTCAGACTCCGAGCATGTGGTGTTCGGGGGCGGAACC |
| | | AAGCTGACTGTGCTCACCACTACCCCAGCACCGAGGCCACCCACCCCG |
| | | GCTCCTACCATCGCCTCCCAGCCTCTGTCCCTGCGTCCGGAGGCATGT |
| | | AGACCCGCAGCTGGTGGGGCCGTGCATACCCGGGGTCTTGACTTCGCC |
| | | TGCGATATCTACATTTGGGCCCCTCTGGCTGGTACTTGCGGGGTCCTG |
| | | CTGCTTTCACTCGTGATCACTCTTTACTGTAAGCGCGGTCGGAAGAAG |
| | | CTGCTGTACATCTTTAAGCAACCCTTCATGAGGCCTGTGCAGACTACT |
| | | CAAGAGGAGGACGGCTGTTCATGCCGGTTCCCAGAGGAGGAGGAAGGC |
| | | GGCTGCGAACTGCGCGTGAAATTCAGCCGCAGCGCAGATGCTCCAGCC |
| | | TACAAGCAGGGGCAGAACCAGCTCTACAACGAACTCAATCTTGGTCGG |
| | | AGAGAGGAGTACGACGTGCTGGACAAGCGGAGAGGACGGGACCCAGAA |
| | | ATGGGCGGGAAGCCGCGCAGAAAGAATCCCCAAGAGGGCCTGTACAAC |
| | | GAGCTCCAAAAGGATAAGATGGCAGAAGCCTATAGCGAGATTGGTATG |
| | | AAAGGGGAACGCAGAAGAGGCAAAGGCCACGACGGACTGTACCAGGGA |
| | | CTCAGCACCGCCACCAAGGACACCTATGACGCTCTTCACATGCAGGCC |
| | | CTGCCGCCTCGG |

149366

| | | |
|---|---|---|
| 149366-aa | 1515 | QVQLVQSGAEVKKPGASVKVSCKPSGYTVTSHYIHWVRRAPGQGLEWM |
| ScFv | | GMINPSGGVTAYSQTLQGRVTMTSDTSSSTVYMELSSLRSEDTAMYYC |
| domain | | AREGSGSGWYFDFWGRGTLVTVSSGGGGSGGGGSGGGGSSYVLTQPPS |
| | | VSVSPGQTASITCSGDGLSKKYVSWYQQKAGQSPVVLISRDKERPSGI |
| | | PDRFSGSNSADTATLTISGTQAMDEADYYCQAWDDTTVVFGGGTKLTV |
| | | L |
| 149366-nt | 1516 | CAAGTGCAGCTGGTGCAGAGCGGGGCCGAAGTCAAGAAGCCGGGAGCC |
| ScFv | | TCCGTGAAAGTGTCCTGCAAGCCTTCGGGATACACCGTGACCTCCCAC |
| domain | | TACATTCATTGGGTCCGCCGCGCCCCCGGCCAAGGACTCGAGTGGATG |
| | | GGCATGATCAACCCTAGCGGCGGAGTGACCGCGTACAGCCAGACGCTG |
| | | CAGGGACGCGTGACTATGACCTCGGATACCTCCTCCTCCACCGTCTAT |
| | | ATGGAACTGTCCAGCCTGCGGTCCGAGGATACCGCCATGTACTACTGC |
| | | GCCCGGGAAGGATCAGGCTCCGGGTGGTATTTCGACTTCTGGGGAAGA |
| | | GGCACCCTCGTGACTGTGTCATCTGGGGGAGGGGGTTCCGGTGGTGGC |
| | | GGATCGGGAGGAGGCGGTTCATCCTACGTGCTGACCCAGCCACCCTCC |
| | | GTGTCCGTGAGCCCCGGCCAGACTGCATCGATTACATGTAGCGGCGAC |
| | | GGCCTCTCCAAGAAATACGTGTCGTGGTACCAGCAGAAGGCCGGACAG |
| | | AGCCCGGTGGTGCTGATCTCAAGAGATAAGGAGCGGCCTAGCGGAATC |
| | | CCGGACAGGTTCTCGGGTTCCAACTCCGCGGACACTGCTACTCTGACC |
| | | ATCTCGGGGACCCAGGCTATGGACGAAGCCGATTACTACTGCCAAGCC |
| | | TGGGACGACACTACTGTCGTGTTTGGAGGGGGCACCAAGTTGACCGTC |
| | | CTT |
| 149366-aa | 1517 | QVQLVQSGAEVKKPGASVKVSCKPSGYTVTSHYIHWVRRAPGQGLEWM |
| VH | | GMINPSGGVTAYSQTLQGRVTMTSDTSSSTVYMELSSLRSEDTAMYYC |
| | | AREGSGSGWYFDFWGRGTLVTVSS |
| 149366-aa | 1518 | SYVLTQPPSVSVSPGQTASITCSGDGLSKKYVSWYQQKAGQSPVVLIS |
| VL | | RDKERPSGIPDRFSGSNSADTATLTISGTQAMDEADYYCQAWDDTTVV |
| | | FGGGTKLTVL |
| 149366-aa | 1519 | MALPVTALLLPLALLLHAARPQVQLVQSGAEVKKPGASVKVSCKPSGY |
| Full CAR | | TVTSHYIHWVRRAPGQGLEWMGMINPSGGVTAYSQTLQGRVTMTSDTS |
| | | SSTVYMELSSLRSEDTAMYYCAREGSGSGWYFDFWGRGTLVTVSSGGG |
| | | GSGGGGSGGGGSSYVLTQPPSVSVSPGQTASITCSGDGLSKKYVSWYQ |
| | | QKAGQSPVVLISRDKERPSGIPDRFSGSNSADTATLTISGTQAMDEAD |
| | | YYCQAWDDTTVVFGGGTKLTVLTTTPAPRPPTPAPTIASQPLSLRPEA |
| | | CRPAAGGAVHTRGLDFACDIYIWAPLAGTCGVLLLSLVITLYCKRGRK |
| | | KLLYIFKQPFMRPVQTTQEEDGCSCRFPEEEEGGCELRVKFSRSADAP |
| | | AYKQGQNQLYNELNLGRREEYDVLDKRRGRDPEMGGKPRRKNPQEGLY |
| | | NELQKDKMAEAYSEIGMKGERRRGKGHDGLYQGLSTATKDTYDALHMQ |
| | | ALPPR |
| 149366-nt | 1520 | ATGGCCCTCCCTGTCACCGCCCTGCTGCTTCCGCTGGCTCTTCTGCTC |
| Full CAR | | CACGCCGCTCGGCCCCAAGTGCAGCTGGTGCAGAGCGGGGCCGAAGTC |
| | | AAGAAGCCGGGAGCCTCCGTGAAAGTGTCCTGCAAGCCTTCGGGATAC |
| | | ACCGTGACCTCCCACTACATTCATTGGGTCCGCCGCGCCCCCGGCCAA |
| | | GGACTCGAGTGGATGGGCATGATCAACCCTAGCGGCGGAGTGACCGCG |
| | | TACAGCCAGACGCTGCAGGGACGCGTGACTATGACCTCGGATACCTCC |
| | | TCCTCCACCGTCTATATGGAACTGTCCAGCCTGCGGTCCGAGGATACC |
| | | GCCATGTACTACTGCGCCCGGGAAGGATCAGGCTCCGGGTGGTATTTC |
| | | GACTTCTGGGGAAGAGGCACCCTCGTGACTGTGTCATCTGGGGGAGGG |
| | | GGTTCCGGTGGTGGCGGATCGGGAGGAGGCGGTTCATCCTACGTGCTG |
| | | ACCCAGCCACCCTCCGTGTCCGTGAGCCCCGGCCAGACTGCATCGATT |
| | | ACATGTAGCGGCGACGGCCTCTCCAAGAAATACGTGTCGTGGTACCAG |
| | | CAGAAGGCCGGACAGAGCCCGGTGGTGCTGATCTCAAGAGATAAGGAG |
| | | CGGCCTAGCGGAATCCCGGACAGGTTCTCGGGTTCCAACTCCGCGGAC |
| | | ACTGCTACTCTGACCATCTCGGGGACCCAGGCTATGGACGAAGCCGAT |
| | | TACTACTGCCAAGCCTGGGACGACACTACTGTCGTGTTTGGAGGGGGC |
| | | ACCAAGTTGACCGTCCTTACCACTACCCCAGCACCGAGGCCACCCACC |
| | | CCGGCTCCTACCATCGCCTCCCAGCCTCTGTCCCTGCGTCCGGAGGCA |
| | | TGTAGACCCGCAGCTGGTGGGGCCGTGCATACCCGGGGTCTTGACTTC |
| | | GCCTGCGATATCTACATTTGGGCCCCTCTGGCTGGTACTTGCGGGGTC |
| | | CTGCTGCTTTCACTCGTGATCACTCTTTACTGTAAGCGCGGTCGGAAG |
| | | AAGCTGCTGTACATCTTTAAGCAACCCTTCATGAGGCCTGTGCAGACT |
| | | ACTCAAGAGGAGGACGGCTGTTCATGCCGGTTCCCAGAGGAGGAGGAA |
| | | GGCGGCTGCGAACTGCGCGTGAAATTCAGCCGCAGCGCAGATGCTCCA |
| | | GCCTACAAGCAGGGGCAGAACCAGCTCTACAACGAACTCAATCTTGGT |
| | | CGGAGAGAGGAGTACGACGTGCTGGACAAGCGGAGAGGACGGGACCCA |
| | | GAAATGGGCGGGAAGCCGCGCAGAAAGAATCCCCAAGAGGGCCTGTAC |
| | | AACGAGCTCCAAAAGGATAAGATGGCAGAAGCCTATAGCGAGATTGGT |
| | | ATGAAAGGGGAACGCAGAAGAGGCAAAGGCCACGACGGACTGTACCAG |
| | | GGACTCAGCACCGCCACCAAGGACACCTATGACGCTCTTCACATGCAG |
| | | GCCCTGCCGCCTCGG |

149367

| | | |
|---|---|---|
| 149367-aa | 1521 | QVQLQESGPGLVKPSQTLSLTCTVSGGSISSGGYYWSWIRQHPGKGLE |
| ScFv | | WIGYIYYSGSTYYNPSLKSRVTISVDTSKNQFSLKLSSVTAADTAVYY |
| domain | | CARAGIAARLRGAFDIWGQGTMVTVSSGGGGSGGGGSGGGGSDIVMTQ |
| | | SPSSVSASVGDRVIITCRASQGIRNWLAWYQQKPGKAPNLLIYAASNL |
| | | QSGVPSRFSGSGSGADFTLTISSLQPEDVATYYCQKYNSAPFTFGPGT |
| | | KVDIK |
| 149367-nt | 1522 | CAAGTGCAGCTTCAGGAGAGCGGCCCGGGACTCGTGAAGCCGTCCCAG |
| ScFv | | ACCCTGTCCCTGACTTGCACCGTGTCGGGAGGAAGCATCTCGAGCGGA |
| domain | | GGCTACTATTGGTCGTGGATTCGGCAGCACCCTGGAAAGGGCCTGGAA |
| | | TGGATCGGCTACATCTACTACTCCGGCTCGACCTACTACAACCCATCG |
| | | CTGAAGTCCAGAGTGACAATCTCAGTGGACACGTCCAAGAATCAGTTC |
| | | AGCCTGAAGCTCTCTTCCGTGACTGCGGCCGACACCGCCGTGTACTAC |
| | | TGCGCACGCGCTGGAATTGCCGCCCGGCTGAGGGGTGCCTTCGACATT |
| | | TGGGGACAGGGCACCATGGTCACCGTGTCCTCCGGCGGCGGAGGTTCC |
| | | GGGGGTGGAGGCTCAGGAGGAGGGGGGTCCGACATCGTCATGACTCAG |
| | | TCGCCCTCAAGCGTCAGCGCGTCCGTCGGGGACAGAGTGATCATCACC |
| | | TGTCGGGCGTCCCAGGGAATTCGCAACTGGCTGGCCTGGTATCAGCAG |
| | | AAGCCCGGAAAGGCCCCCAACCTGTTGATCTACGCCGCCTCAAACCTC |
| | | CAATCCGGGGTGCCGAGCCGCTTCAGCGGCTCCGGTTCGGGTGCCGAT |
| | | TTCACTCTGACCATCTCCTCCCTGCAACCTGAAGATGTGGCTACCTAC |
| | | TACTGCCAAAAGTACAACTCCGCACCTTTTACTTTCGGACCGGGGACC |
| | | AAAGTGGACATTAAG |
| 149367-aa | 1523 | QVQLQESGPGLVKPSQTLSLTCTVSGGSISSGGYYWSWIRQHPGKGLE |
| VH | | WIGYIYYSGSTYYNPSLKSRVTISVDTSKNQFSLKLSSVTAADTAVYY |
| | | CARAGIAARLRGAFDIWGQGTMVTVSS |
| 149367-aa | 1524 | DIVMTQSPSSVSASVGDRVIITCRASQGIRNWLAWYQQKPGKAPNLLI |
| VL | | YAASNLQSGVPSRFSGSGSGADFTLTISSLQPEDVATYYCQKYNSAPF |
| | | TFGPGTKVDIK |
| 149367-aa | 1525 | MALPVTALLLPLALLLHAARPQVQLQESGPGLVKPSQTLSLTCTVSGG |
| Full CAR | | SISSGGYYWSWIRQHPGKGLEWIGYIYYSGSTYYNPSLKSRVTISVDT |
| | | SKNQFSLKLSSVTAADTAVYYCARAGIAARLRGAFDIWGQGTMVTVSS |
| | | GGGGSGGGGSGGGGSDIVMTQSPSSVSASVGDRVIITCRASQGIRNWL |
| | | AWYQQKPGKAPNLLIYAASNLQSGVPSRFSGSGSGADFTLTISSLQPE |
| | | DVATYYCQKYNSAPFTFGPGTKVDIKTTTPAPRPPTPAPTIASQPLSL |
| | | RPEACRPAAGGAVHTRGLDFACDIYIWAPLAGTCGVLLLSLVITLYCK |
| | | RGRKKLLYIFKQPFMRPVQTTQEEDGCSCRFPEEEEGGCELRVKFSRS |
| | | ADAPAYKQGQNQLYNELNLGRREEYDVLDKRRGRDPEMGGKPRRKNPQ |
| | | EGLYNELQKDKMAEAYSEIGMKGERRRGKGHDGLYQGLSTATKDTYDA |
| | | LHMQALPPR |
| 149367-nt | 1526 | ATGGCCCTCCCTGTCACCGCCCTGCTGCTTCCGCTGGCTCTTCTGCTC |
| Full CAR | | CACGCCGCTCGGCCCCAAGTGCAGCTTCAGGAGAGCGGCCCGGGACTC |
| | | GTGAAGCCGTCCCAGACCCTGTCCCTGACTTGCACCGTGTCGGGAGGA |
| | | AGCATCTCGAGCGGAGGCTACTATTGGTCGTGGATTCGGCAGCACCCT |
| | | GGAAAGGGCCTGGAATGGATCGGCTACATCTACTACTCCGGCTCGACC |
| | | TACTACAACCCATCGCTGAAGTCCAGAGTGACAATCTCAGTGGACACG |
| | | TCCAAGAATCAGTTCAGCCTGAAGCTCTCTTCCGTGACTGCGGCCGAC |
| | | ACCGCCGTGTACTACTGCGCACGCGCTGGAATTGCCGCCCGGCTGAGG |
| | | GGTGCCTTCGACATTTGGGGACAGGGCACCATGGTCACCGTGTCCTCC |
| | | GGCGGCGGAGGTTCCGGGGGTGGAGGCTCAGGAGGAGGGGGGTCCGAC |
| | | ATCGTCATGACTCAGTCGCCCTCAAGCGTCAGCGCGTCCGTCGGGGAC |
| | | AGAGTGATCATCACCTGTCGGGCGTCCCAGGGAATTCGCAACTGGCTG |
| | | GCCTGGTATCAGCAGAAGCCCGGAAAGGCCCCCAACCTGTTGATCTAC |
| | | GCCGCCTCAAACCTCCAATCCGGGGTGCCGAGCCGCTTCAGCGGCTCC |
| | | GGTTCGGGTGCCGATTTCACTCTGACCATCTCCTCCCTGCAACCTGAA |
| | | GATGTGGCTACCTACTACTGCCAAAAGTACAACTCCGCACCTTTTACT |
| | | TTCGGACCGGGGACCAAAGTGGACATTAAGACCACTACCCCAGCACCG |
| | | AGGCCACCCACCCCGGCTCCTACCATCGCCTCCCAGCCTCTGTCCCTG |
| | | CGTCCGGAGGCATGTAGACCCGCAGCTGGTGGGGCCGTGCATACCCGG |
| | | GGTCTTGACTTCGCCTGCGATATCTACATTTGGGCCCCTCTGGCTGGT |
| | | ACTTGCGGGGTCCTGCTGCTTTCACTCGTGATCACTCTTTACTGTAAG |
| | | CGCGGTCGGAAGAAGCTGCTGTACATCTTTAAGCAACCCTTCATGAGG |
| | | CCTGTGCAGACTACTCAAGAGGAGGACGGCTGTTCATGCCGGTTCCCA |
| | | GAGGAGGAGGAAGGCGGCTGCGAACTGCGCGTGAAATTCAGCCGCAGC |
| | | GCAGATGCTCCAGCCTACAAGCAGGGGCAGAACCAGCTCTACAACGAA |
| | | CTCAATCTTGGTCGGAGAGAGGAGTACGACGTGCTGGACAAGCGGAGA |
| | | GGACGGGACCCAGAAATGGGCGGGAAGCCGCGCAGAAAGAATCCCCAA |
| | | GAGGGCCTGTACAACGAGCTCCAAAAGGATAAGATGGCAGAAGCCTAT |
| | | AGCGAGATTGGTATGAAAGGGGAACGCAGAAGAGGCAAAGGCCACGAC |
| | | GGACTGTACCAGGGACTCAGCACCGCCACCAAGGACACCTATGACGCT |
| | | CTTCACATGCAGGCCCTGCCGCCTCGG |

149368

| | | |
|---|---|---|
| 149368-aa | 1527 | QVQLVQSGAEVKKPGSSVKVSCKASGGTFSSYAISWVRQAPGQGLEWM |
| ScFv | | GGIIPIFGTANYAQKFQGRVTITADESTSTAYMELSSLRSEDTAVYYC |
| domain | | ARRGGYQLLRWDVGLLRSAFDIWGQGTMVTVSSGGGGSGGGGSGGGGS |
| | | SYVLTQPPSVSVAPGQTARITCGGNNIGSKSVHWYQQKPGQAPVLVLY |
| | | GKNNRPSGVPDRFSGSRSGTTASLTITGAQAEDEADYYCSSRDSSGDH |
| | | LRVFGTGTKVTVL |
| 149368-nt | 1528 | CAAGTGCAGCTGGTCCAGTCGGGCGCCGAGGTCAAGAAGCCCGGGAGC |
| ScFv | | TCTGTGAAAGTGTCCTGCAAGGCCTCCGGGGGCACCTTTAGCTCCTAC |
| domain | | GCCATCTCCTGGGTCCGCCAAGCACCGGGTCAAGGCCTGGAGTGGATG |
| | | GGGGGAATTATCCCTATCTTCGGCACTGCCAACTACGCCCAGAAGTTC |
| | | CAGGGACGCGTGACCATTACCGCGGACGAATCCACCTCCACCGCTTAT |
| | | ATGGAGCTGTCCAGCTTGCGCTCGGAAGATACCGCCGTGTACTACTGC |
| | | GCCCGGAGGGGTGGATACCAGCTGCTGAGATGGGACGTGGGCCTCCTG |
| | | CGGTCGGCGTTCGACATCTGGGGCCAGGGCACTATGGTCACTGTGTCC |
| | | AGCGGAGGAGGCGGATCGGGAGGCGGCGGATCAGGGGGAGGCGGTTCC |
| | | AGCTACGTGCTTACTCAACCCCCTTCGGTGTCCGTGGCCCCGGGACAG |
| | | ACCGCCAGAATCACTTGCGGAGGAAACAACATTGGGTCCAAGAGCGTG |
| | | CATTGGTACCAGCAGAAGCCAGGACAGGCCCCTGTGCTGGTGCTCTAC |
| | | GGGAAGAACAATCGGCCCAGCGGAGTGCCGGACAGGTTCTCGGGTTCA |
| | | CGCTCCGGTACAACCGCTTCACTGACTATCACCGGGGCCCAGGCAGAG |
| | | GATGAAGCGGACTACTACTGTTCCTCCCGGGATTCATCCGGCGACCAC |
| | | CTCCGGGTGTTCGGAACCGGAACGAAGGTCACCGTGCTG |
| 149368-aa | 1529 | QVQLVQSGAEVKKPGSSVKVSCKASGGTFSSYAISWVRQAPGQGLEWM |
| VH | | GGIIPIFGTANYAQKFQGRVTITADESTSTAYMELSSLRSEDTAVYYC |
| | | ARRGGYQLLRWDVGLLRSAFDIWGQGTMVTVSS |
| 149368-aa | 1530 | SYVLTQPPSVSVAPGQTARITCGGNNIGSKSVHWYQQKPGQAPVLVLY |
| VL | | GKNNRPSGVPDRFSGSRSGTTASLTITGAQAEDEADYYCSSRDSSGDH |
| | | LRVFGTGTKVTVL |
| 149368-aa | 1531 | MALPVTALLLPLALLLHAARPQVQLVQSGAEVKKPGSSVKVSCKASGG |
| Full CAR | | TESSYAISWVRQAPGQGLEWMGGIIPIFGTANYAQKFQGRVTITADES |
| | | TSTAYMELSSLRSEDTAVYYCARRGGYQLLRWDVGLLRSAFDIWGQGT |
| | | MVTVSSGGGGSGGGGSGGGGSSYVLTQPPSVSVAPGQTARITCGGNNI |
| | | GSKSVHWYQQKPGQAPVLVLYGKNNRPSGVPDRFSGSRSGTTASLTIT |
| | | GAQAEDEADYYCSSRDSSGDHLRVFGTGTKVTVLTTTPAPRPPTPAPT |
| | | IASQPLSLRPEACRPAAGGAVHTRGLDFACDIYIWAPLAGTCGVLLLS |
| | | LVITLYCKRGRKKLLYIFKQPFMRPVQTTQEEDGCSCRFPEEEEGGCE |
| | | LRVKFSRSADAPAYKQGQNQLYNELNLGRREEYDVLDKRRGRDPEMGG |
| | | KPRRKNPQEGLYNELQKDKMAEAYSEIGMKGERRRGKGHDGLYQGLST |
| | | ATKDTYDALHMQALPPR |
| 149368-nt | 1532 | ATGGCCCTCCCTGTCACCGCCCTGCTGCTTCCGCTGGCTCTTCTGCTC |
| Full CAR | | CACGCCGCTCGGCCCCAAGTGCAGCTGGTCCAGTCGGGCGCCGAGGTC |
| | | AAGAAGCCCGGGAGCTCTGTGAAAGTGTCCTGCAAGGCCTCCGGGGGC |
| | | ACCTTTAGCTCCTACGCCATCTCCTGGGTCCGCCAAGCACCGGGTCAA |
| | | GGCCTGGAGTGGATGGGGGGAATTATCCCTATCTTCGGCACTGCCAAC |
| | | TACGCCCAGAAGTTCCAGGGACGCGTGACCATTACCGCGGACGAATCC |
| | | ACCTCCACCGCTTATATGGAGCTGTCCAGCTTGCGCTCGGAAGATACC |
| | | GCCGTGTACTACTGCGCCCGGAGGGGTGGATACCAGCTGCTGAGATGG |
| | | GACGTGGGCCTCCTGCGGTCGGCGTTCGACATCTGGGGCCAGGGCACT |
| | | ATGGTCACTGTGTCCAGCGGAGGAGGCGGATCGGGAGGCGGCGGATCA |
| | | GGGGGAGGCGGTTCCAGCTACGTGCTTACTCAACCCCCTTCGGTGTCC |
| | | GTGGCCCCGGGACAGACCGCCAGAATCACTTGCGGAGGAAACAACATT |
| | | GGGTCCAAGAGCGTGCATTGGTACCAGCAGAAGCCAGGACAGGCCCCT |
| | | GTGCTGGTGCTCTACGGGAAGAACAATCGGCCCAGCGGAGTGCCGGAC |
| | | AGGTTCTCGGGTTCACGCTCCGGTACAACCGCTTCACTGACTATCACC |
| | | GGGGCCCAGGCAGAGGATGAAGCGGACTACTACTGTTCCTCCCGGGAT |
| | | TCATCCGGCGACCACCTCCGGGTGTTCGGAACCGGAACGAAGGTCACC |
| | | GTGCTGACCACTACCCCAGCACCGAGGCCACCCACCCCGGCTCCTACC |
| | | ATCGCCTCCCAGCCTCTGTCCCTGCGTCCGGAGGCATGTAGACCCGCA |
| | | GCTGGTGGGGCCGTGCATACCCGGGGTCTTGACTTCGCCTGCGATATC |
| | | TACATTTGGGCCCCTCTGGCTGGTACTTGCGGGGTCCTGCTGCTTTCA |
| | | CTCGTGATCACTCTTTACTGTAAGCGCGGTCGGAAGAAGCTGCTGTAC |
| | | ATCTTTAAGCAACCCTTCATGAGGCCTGTGCAGACTACTCAAGAGGAG |
| | | GACGGCTGTTCATGCCGGTTCCCAGAGGAGGAGGAAGGCGGCTGCGAA |
| | | CTGCGCGTGAAATTCAGCCGCAGCGCAGATGCTCCAGCCTACAAGCAG |
| | | GGGCAGAACCAGCTCTACAACGAACTCAATCTTGGTCGGAGAGAGGAG |
| | | TACGACGTGCTGGACAAGCGGAGAGGACGGGACCCAGAAATGGGCGGG |
| | | AAGCCGCGCAGAAAGAATCCCCAAGAGGGCCTGTACAACGAGCTCCAA |
| | | AAGGATAAGATGGCAGAAGCCTATAGCGAGATTGGTATGAAAGGGGAA |
| | | CGCAGAAGAGGCAAAGGCCACGACGGACTGTACCAGGGACTCAGCACC |
| | | GCCACCAAGGACACCTATGACGCTCTTCACATGCAGGCCCTGCCGCCT |
| | | CGG |

149369

| | | |
|---|---|---|
| 149369-aa | 1533 | EVQLQQSGPGLVKPSQTLSLTCAISGDSVSSNSAAWNWIRQSPSRGLE |
| ScFv | | WLGRTYYRSKWYSFYAISLKSRIIINPDTSKNQFSLQLKSVTPEDTAV |
| domain | | YYCARSSPEGLFLYWFDPWGQGTLVTVSSGGDGSGGGGSGGGGSSSEL |
| | | TQDPAVSVALGQTIRITCQGDSLGNYYATWYQQKPGQAPVLVIYGTNN |
| | | RPSGIPDRFSASSSGNTASLTITGAQAEDEADYYCNSRDSSGHHLLFG |
| | | TGTKVTVL |
| 149369-nt | 1534 | GAAGTGCAGCTCCAACAGTCAGGACCGGGGCTCGTGAAGCCATCCCAG |
| ScFv | | ACCCTGTCCCTGACTTGTGCCATCTCGGGAGATAGCGTGTCATCGAAC |
| domain | | TCCGCCGCCTGGAACTGGATTCGGCAGAGCCCGTCCCGCGGACTGGAG |
| | | TGGCTTGGAAGGACCTACTACCGGTCCAAGTGGTACTCTTTCTACGCG |
| | | ATCTCGCTGAAGTCCCGCATTATCATTAACCCTGATACCTCCAAGAAT |
| | | CAGTTCTCCCTCCAACTGAAATCCGTCACCCCCGAGGACACAGCAGTG |
| | | TATTACTGCGCACGGAGCAGCCCCGAAGGACTGTTCCTGTATTGGTTT |
| | | GACCCCTGGGGCCAGGGGACTCTTGTGACCGTGTCGAGCGGCGGAGAT |
| | | GGGTCCGGTGGCGGTGGTTCGGGGGGCGGCGGATCATCATCCGAACTG |
| | | ACCCAGGACCCGGCTGTGTCCGTGGCGCTGGGACAAACCATCCGCATT |
| | | ACGTGCCAGGGAGACTCCCTGGGCAACTACTACGCCACTTGGTACCAG |
| | | CAGAAGCCGGGCCAAGCCCCTGTGTTGGTCATCTACGGGACCAACAAC |
| | | AGACCTTCCGGCATCCCCGACCGGTTCAGCGCTTCGTCCTCCGGCAAC |
| | | ACTGCCAGCCTGACCATCACTGGAGCGCAGGCCGAAGATGAGGCCGAC |
| | | TACTACTGCAACAGCAGAGACTCCTCGGGTCATCACCTCTTGTTCGGA |
| | | ACTGGAACCAAGGTCACCGTGCTG |
| 149369-aa | 1535 | EVQLQQSGPGLVKPSQTLSLTCAISGDSVSSNSAAWNWIRQSPSRGLE |
| VH | | WLGRTYYRSKWYSFYAISLKSRIIINPDTSKNQFSLQLKSVTPEDTAV |
| | | YYCARSSPEGLFLYWFDPWGQGTLVTVSS |
| 149369-aa | 1536 | SSELTQDPAVSVALGQTIRITCQGDSLGNYYATWYQQKPGQAPVLVIY |
| VL | | GTNNRPSGIPDRFSASSSGNTASLTITGAQAEDEADYYCNSRDSSGHH |
| | | LLFGTGTKVTVL |
| 149369-aa | 1537 | MALPVTALLLPLALLLHAARPEVQLQQSGPGLVKPSQTLSLTCAISGD |
| Full CAR | | SVSSNSAAWNWIRQSPSRGLEWLGRTYYRSKWYSFYAISLKSRIIINP |
| | | DTSKNQFSLQLKSVTPEDTAVYYCARSSPEGLFLYWFDPWGQGTLVTV |
| | | SSGGDGSGGGGSGGGGSSSELTQDPAVSVALGQTIRITCQGDSLGNYY |
| | | ATWYQQKPGQAPVLVIYGTNNRPSGIPDRFSASSSGNTASLTITGAQA |
| | | EDEADYYCNSRDSSGHHLLFGTGTKVTVLTTTPAPRPPTPAPTIASQP |
| | | LSLRPEACRPAAGGAVHTRGLDFACDIYIWAPLAGTCGVLLLSLVITL |
| | | YCKRGRKKLLYIFKQPFMRPVQTTQEEDGCSCRFPEEEEGGCELRVKF |
| | | SRSADAPAYKQGQNQLYNELNLGRREEYDVLDKRRGRDPEMGGKPRRK |
| | | NPQEGLYNELQKDKMAEAYSEIGMKGERRRGKGHDGLYQGLSTATKDT |
| | | YDALHMQALPPR |
| 149369-nt | 1538 | ATGGCCCTCCCTGTCACCGCCCTGCTGCTTCCGCTGGCTCTTCTGCTC |
| Full CAR | | CACGCCGCTCGGCCCGAAGTGCAGCTCCAACAGTCAGGACCGGGGCTC |
| | | GTGAAGCCATCCCAGACCCTGTCCCTGACTTGTGCCATCTCGGGAGAT |
| | | AGCGTGTCATCGAACTCCGCCGCCTGGAACTGGATTCGGCAGAGCCCG |
| | | TCCCGCGGACTGGAGTGGCTTGGAAGGACCTACTACCGGTCCAAGTGG |
| | | TACTCTTTCTACGCGATCTCGCTGAAGTCCCGCATTATCATTAACCCT |
| | | GATACCTCCAAGAATCAGTTCTCCCTCCAACTGAAATCCGTCACCCCC |
| | | GAGGACACAGCAGTGTATTACTGCGCACGGAGCAGCCCCGAAGGACTG |
| | | TTCCTGTATTGGTTTGACCCCTGGGGCCAGGGGACTCTTGTGACCGTG |
| | | TCGAGCGGCGGAGATGGGTCCGGTGGCGGTGGTTCGGGGGGCGGCGGA |
| | | TCATCATCCGAACTGACCCAGGACCCGGCTGTGTCCGTGGCGCTGGGA |
| | | CAAACCATCCGCATTACGTGCCAGGGAGACTCCCTGGGCAACTACTAC |
| | | GCCACTTGGTACCAGCAGAAGCCGGGCCAAGCCCCTGTGTTGGTCATC |
| | | TACGGGACCAACAACAGACCTTCCGGCATCCCCGACCGGTTCAGCGCT |
| | | TCGTCCTCCGGCAACACTGCCAGCCTGACCATCACTGGAGCGCAGGCC |
| | | GAAGATGAGGCCGACTACTACTGCAACAGCAGAGACTCCTCGGGTCAT |
| | | CACCTCTTGTTCGGAACTGGAACCAAGGTCACCGTGCTGACCACTACC |
| | | CCAGCACCGAGGCCACCCACCCCGGCTCCTACCATCGCCTCCCAGCCT |
| | | CTGTCCCTGCGTCCGGAGGCATGTAGACCCGCAGCTGGTGGGGCCGTG |
| | | CATACCCGGGGTCTTGACTTCGCCTGCGATATCTACATTTGGGCCCCT |
| | | CTGGCTGGTACTTGCGGGGTCCTGCTGCTTTCACTCGTGATCACTCTT |
| | | TACTGTAAGCGCGGTCGGAAGAAGCTGCTGTACATCTTTAAGCAACCC |
| | | TTCATGAGGCCTGTGCAGACTACTCAAGAGGAGGACGGCTGTTCATGC |
| | | CGGTTCCCAGAGGAGGAGGAAGGCGGCTGCGAACTGCGCGTGAAATTC |
| | | AGCCGCAGCGCAGATGCTCCAGCCTACAAGCAGGGGCAGAACCAGCTC |
| | | TACAACGAACTCAATCTTGGTCGGAGAGAGGAGTACGACGTGCTGGAC |
| | | AAGCGGAGAGGACGGGACCCAGAAATGGGCGGGAAGCCGCGCAGAAAG |
| | | AATCCCCAAGAGGGCCTGTACAACGAGCTCCAAAAGGATAAGATGGCA |
| | | GAAGCCTATAGCGAGATTGGTATGAAAGGGGAACGCAGAAGAGGCAAA |
| | | GGCCACGACGGACTGTACCAGGGACTCAGCACCGCCACCAAGGACACC |
| | | TATGACGCTCTTCACATGCAGGCCCTGCCGCCTCGG |

BCMA_EBB-C1978-A4

| | | |
|---|---|---|
| BCMA_EB | 1539 | EVQLVESGGGLVQPGGSLRLSCAASGFTFSSYAMSWVRQAPGKGLEWV |
| B-C1978-A4- | | SAISGSGGSTYYADSVKGRFTISRDNSKNTLYLQMNSLRAEDTAVYYC |
| aa | | AKVEGSGSLDYWGQGTLVTVSSGGGGSGGGGSGGGGSEIVMTQSPGTL |
| ScFv | | SLSPGERATLSCRASQSVSSAYLAWYQQKPGQPPRLLISGASTRATGI |
| domain | | PDRFGGSGSGTDFTLTISRLEPEDFAVYYCQHYGSSFNGSSLFTFGQG |
| | | TRLEIK |
| BCMA_EB | 1540 | GAAGTGCAGCTCGTGGAGTCAGGAGGCGGCCTGGTCCAGCCGGGAGGG |
| B-C1978-A4- | | TCCCTTAGACTGTCATGCGCCGCAAGCGGATTCACTTTCTCCTCCTAT |
| nt | | GCCATGAGCTGGGTCCGCCAAGCCCCCGGAAAGGGACTGGAATGGGTG |
| ScFv | | TCCGCCATCTCGGGGTCTGGAGGCTCAACTTACTACGCTGACTCCGTG |
| domain | | AAGGGACGGTTCACCATTAGCCGCGACAACTCCAAGAACACCCTCTAC |
| | | CTCCAAATGAACTCCCTGCGGGCCGAGGATACCGCCGTCTACTACTGC |
| | | GCCAAAGTGGAAGGTTCAGGATCGCTGGACTACTGGGGACAGGGTACT |
| | | CTCGTGACCGTGTCATCGGGCGGAGGAGGTTCCGGCGGTGGCGGCTCC |
| | | GGCGGCGGAGGGTCGGAGATCGTGATGACCCAGAGCCCTGGTACTCTG |
| | | AGCCTTTCGCCGGGAGAAAGGGCCACCCTGTCCTGCCGCGCTTCCCAA |
| | | TCCGTGTCCTCCGCGTACTTGGCGTGGTACCAGCAGAAGCCGGGACAG |
| | | CCCCCTCGGCTGCTGATCAGCGGGGCCAGCACCCGGGCAACCGGAATC |
| | | CCAGACAGATTCGGGGGTTCCGGCAGCGGCACAGATTTCACCCTGACT |
| | | ATTTCGAGGTTGGAGCCCGAGGACTTTGCGGTGTATTACTGTCAGCAC |
| | | TACGGGTCGTCCTTTAATGGCTCCAGCCTGTTCACGTTCGGACAGGGG |
| | | ACCCGCCTGGAAATCAAG |
| BCMA_EB | 1541 | EVQLVESGGGLVQPGGSLRLSCAASGFTFSSYAMSWVRQAPGKGLEWV |
| B-C1978-A4- | | SAISGSGGSTYYADSVKGRFTISRDNSKNTLYLQMNSLRAEDTAVYYC |
| aa | | AKVEGSGSLDYWGQGTLVTVSS |
| VH | | |
| BCMA_EB | 1542 | EIVMTQSPGTLSLSPGERATLSCRASQSVSSAYLAWYQQKPGQPPRLL |
| B-C1978-A4 | | ISGASTRATGIPDRFGGSGSGTDFTLTISRLEPEDFAVYYCQHYGSSF |
| -aa | | NGSSLFTFGQGTRLEIK |
| VL | | |
| BCMA_EB | 1543 | MALPVTALLLPLALLLHAARPEVQLVESGGGLVQPGGSLRLSCAASGF |
| B-C1978-A4- | | TFSSYAMSWVRQAPGKGLEWVSAISGSGGSTYYADSVKGRFTISRDNS |
| aa | | KNTLYLQMNSLRAEDTAVYYCAKVEGSGSLDYWGQGTLVTVSSGGGGS |
| Full CART | | GGGGSGGGGSEIVMTQSPGTLSLSPGERATLSCRASQSVSSAYLAWYQ |
| | | QKPGQPPRLLISGASTRATGIPDRFGGSGSGTDFTLTISRLEPEDFAV |
| | | YYCQHYGSSFNGSSLFTFGQGTRLEIKTTTPAPRPPTPAPTIASQPLS |
| | | LRPEACRPAAGGAVHTRGLDFACDIYIWAPLAGTCGVLLLSLVITLYC |
| | | KRGRKKLLYIFKQPFMRPVQTTQEEDGCSCRFPEEEEGGCELRVKFSR |
| | | SADAPAYKQGQNQLYNELNLGRREEYDVLDKRRGRDPEMGGKPRRKNP |
| | | QEGLYNELQKDKMAEAYSEIGMKGERRRGKGHDGLYQGLSTATKDTYD |
| | | ALHMQALPPR |
| BCMA_EB | 1544 | ATGGCCCTCCCTGTCACCGCCCTGCTGCTTCCGCTGGCTCTTCTGCTC |
| B-C1978-A4- | | CACGCCGCTCGGCCCGAAGTGCAGCTCGTGGAGTCAGGAGGCGGCCTG |
| nt | | GTCCAGCCGGGAGGGTCCCTTAGACTGTCATGCGCCGCAAGCGGATTC |
| Full CART | | ACTTTCTCCTCCTATGCCATGAGCTGGGTCCGCCAAGCCCCCGGAAAG |
| | | GGACTGGAATGGGTGTCCGCCATCTCGGGGTCTGGAGGCTCAACTTAC |
| | | TACGCTGACTCCGTGAAGGGACGGTTCACCATTAGCCGCGACAACTCC |
| | | AAGAACACCCTCTACCTCCAAATGAACTCCCTGCGGGCCGAGGATACC |
| | | GCCGTCTACTACTGCGCCAAAGTGGAAGGTTCAGGATCGCTGGACTAC |
| | | TGGGGACAGGGTACTCTCGTGACCGTGTCATCGGGCGGAGGAGGTTCC |
| | | GGCGGTGGCGGCTCCGGCGGCGGAGGGTCGGAGATCGTGATGACCCAG |
| | | AGCCCTGGTACTCTGAGCCTTTCGCCGGGAGAAAGGGCCACCCTGTCC |
| | | TGCCGCGCTTCCCAATCCGTGTCCTCCGCGTACTTGGCGTGGTACCAG |
| | | CAGAAGCCGGGACAGCCCCCTCGGCTGCTGATCAGCGGGGCCAGCACC |
| | | CGGGCAACCGGAATCCCAGACAGATTCGGGGGTTCCGGCAGCGGCACA |
| | | GATTTCACCCTGACTATTTCGAGGTTGGAGCCCGAGGACTTTGCGGTG |
| | | TATTACTGTCAGCACTACGGGTCGTCCTTTAATGGCTCCAGCCTGTTC |
| | | ACGTTCGGACAGGGGACCCGCCTGGAAATCAAGACCACTACCCCAGCA |
| | | CCGAGGCCACCCACCCCGGCTCCTACCATCGCCTCCCAGCCTCTGTCC |
| | | CTGCGTCCGGAGGCATGTAGACCCGCAGCTGGTGGGGCCGTGCATACC |
| | | CGGGGTCTTGACTTCGCCTGCGATATCTACATTTGGGCCCCTCTGGCT |
| | | GGTACTTGCGGGGTCCTGCTGCTTTCACTCGTGATCACTCTTTACTGT |
| | | AAGCGCGGTCGGAAGAAGCTGCTGTACATCTTTAAGCAACCCTTCATG |
| | | AGGCCTGTGCAGACTACTCAAGAGGAGGACGGCTGTTCATGCCGGTTC |
| | | CCAGAGGAGGAGGAAGGCGGCTGCGAACTGCGCGTGAAATTCAGCCGC |
| | | AGCGCAGATGCTCCAGCCTACAAGCAGGGGCAGAACCAGCTCTACAAC |
| | | GAACTCAATCTTGGTCGGAGAGAGGAGTACGACGTGCTGGACAAGCGG |
| | | AGAGGACGGGACCCAGAAATGGGCGGGAAGCCGCGCAGAAAGAATCCC |
| | | CAAGAGGGCCTGTACAACGAGCTCCAAAAGGATAAGATGGCAGAAGCC |
| | | TATAGCGAGATTGGTATGAAAGGGGAACGCAGAAGAGGCAAAGGCCAC |
| | | GACGGACTGTACCAGGGACTCAGCACCGCCACCAAGGACACCTATGAC |
| | | GCTCTTCACATGCAGGCCCTGCCGCCTCGG |

BCMA_EBB-C1978-G1

| | | |
|---|---|---|
| BCMA_EB | 1545 | EVQLVETGGGLVQPGGSLRLSCAASGITFSRYPMSWVRQAPGKG |
| B-C1978-G1- | | LEWVSGISDSGVSTYYADSAKGRFTISRDNSKNTLFLQMSSLRDE |
| aa | | DTAVYYCVTRAGSEASDIWGQGTMVTVSSGGGGSGGGGSGGG |
| ScFv | | GSEIVLTQSPATLSLSPGERATLSCRASQSVSNSLAWYQQKPGQA |
| domain | | PRLLIYDASSRATGIPDRFSGSGSGTDFTLTISRLEPEDFAIYYCQQ |
| | | FGTSSGLTFGGGTKLEIK |
| BCMA_EB | 1546 | GAAGTGCAACTGGTGGAAACCGGTGGCGGCCTGGTGCAGCCTGGAGGA |
| B-C1978-G1- | | TCATTGAGGCTGTCATGCGCGGCCAGCGGTATTACCTTCTCCCGGTAC |
| nt | | CCCATGTCCTGGGTCAGACAGGCCCCGGGGAAAGGGCTTGAATGGGTG |
| ScFv | | TCCGGGATCTCGGACTCCGGTGTCAGCACTTACTACGCCGACTCCGCC |
| domain | | AAGGGACGCTTCACCATTTCCCGGGACAACTCGAAGAACACCCTGTTC |
| | | CTCCAAATGAGCTCCCTCCGGGACGAGGATACTGCAGTGTACTACTGC |
| | | GTGACCCGCGCCGGGTCCGAGGCGTCTGACATTTGGGGACAGGGCACT |
| | | ATGGTCACCGTGTCGTCCGGCGGAGGGGGCTCGGGAGGCGGTGGCAGC |
| | | GGAGGAGGAGGGTCCGAGATCGTGCTGACCCAATCCCCGGCCACCCTC |
| | | TCGCTGAGCCCTGGAGAAAGGGCAACCTTGTCCTGTCGCGCGAGCCAG |
| | | TCCGTGAGCAACTCCCTGGCCTGGTACCAGCAGAAGCCCGGACAGGCT |
| | | CCGAGACTTCTGATCTACGACGCTTCGAGCCGGGCCACTGGAATCCCC |
| | | GACCGCTTTTCGGGGTCCGGCTCAGGAACCGATTTCACCCTGACAATC |
| | | TCACGGCTGGAGCCAGAGGATTTCGCCATCTATTACTGCCAGCAGTTC |
| | | GGTACTTCCTCCGGCCTGACTTTCGGAGGCGGCACGAAGCTCGAAATC |
| | | AAG |
| BCMA_EB | 1547 | EVQLVETGGGLVQPGGSLRLSCAASGITFSRYPMSWVRQAPGKGLEWV |
| B-C1978-G1- | | SGISDSGVSTYYADSAKGRFTISRDNSKNTLFLQMSSLRDEDTAVYYC |
| aa | | VTRAGSEASDIWGQGTMVTVSS |
| VH | | |
| BCMA_EB | 1548 | EIVLTQSPATLSLSPGERATLSCRASQSVSNSLAWYQQKPGQAPRLLI |
| B-C1978-G1- | | YDASSRATGIPDRFSGSGSGTDFTLTISRLEPEDFAIYYCQQFGTSSG |
| aa | | LTFGGGTKLEIK |
| VL | | |
| BCMA_EB | 1549 | MALPVTALLLPLALLLHAARPEVQLVETGGGLVQPGGSLRLSCA |
| B-C1978-G1- | | ASGITFSRYPMSWVRQAPGKGLEWVSGISDSGVSTYYADSAKGR |
| aa | | FTISRDNSKNTLFLQMSSLRDEDTAVYYCVTRAGSEASDIWGQG |
| Full CART | | TMVTVSSGGGGSGGGGSGGGGSEIVLTQSPATLSLSPGERATLSC |
| | | RASQSVSNSLAWYQQKPGQAPRLLIYDASSRATGIPDRFSGSGSG |
| | | TDFTLTISRLEPEDFAIYYCQQFGTSSGLTFGGGTKLEIKTTTPAPR |
| | | PPTPAPTIASQPLSLRPEACRPAAGGAVHTRGLDFACDIYIWAPL |
| | | AGTCGVLLLSLVITLYCKRGRKKLLYIFKQPFMRPVQTTQEEDG |
| | | CSCRFPEEEEGGCELRVKFSRSADAPAYKQGQNQLYNELNLGRR |
| | | EEYDVLDKRRGRDPEMGGKPRRKNPQEGLYNELQKDKMAEAY |
| | | SEIGMKGERRRGKGHDGLYQGLSTATKDTYDALHMQALPPR |
| BCMA_EB | 1550 | ATGGCCCTCCCTGTCACCGCCCTGCTGCTTCCGCTGGCTCTTCTGCTC |
| B-C1978-G1- | | CACGCCGCTCGGCCCGAAGTGCAACTGGTGGAAACCGGTGGCGGCCTG |
| nt | | GTGCAGCCTGGAGGATCATTGAGGCTGTCATGCGCGGCCAGCGGTATT |
| Full CART | | ACCTTCTCCCGGTACCCCATGTCCTGGGTCAGACAGGCCCCGGGGAAA |
| | | GGGCTTGAATGGGTGTCCGGGATCTCGGACTCCGGTGTCAGCACTTAC |
| | | TACGCCGACTCCGCCAAGGGACGCTTCACCATTTCCCGGGACAACTCG |
| | | AAGAACACCCTGTTCCTCCAAATGAGCTCCCTCCGGGACGAGGATACT |
| | | GCAGTGTACTACTGCGTGACCCGCGCCGGGTCCGAGGCGTCTGACATT |
| | | TGGGGACAGGGCACTATGGTCACCGTGTCGTCCGGCGGAGGGGGCTCG |
| | | GGAGGCGGTGGCAGCGGAGGAGGAGGGTCCGAGATCGTGCTGACCCAA |
| | | TCCCCGGCCACCCTCTCGCTGAGCCCTGGAGAAAGGGCAACCTTGTCC |
| | | TGTCGCGCGAGCCAGTCCGTGAGCAACTCCCTGGCCTGGTACCAGCAG |
| | | AAGCCCGGACAGGCTCCGAGACTTCTGATCTACGACGCTTCGAGCCGG |
| | | GCCACTGGAATCCCCGACCGCTTTTCGGGGTCCGGCTCAGGAACCGAT |
| | | TTCACCCTGACAATCTCACGGCTGGAGCCAGAGGATTTCGCCATCTAT |
| | | TACTGCCAGCAGTTCGGTACTTCCTCCGGCCTGACTTTCGGAGGCGGC |
| | | ACGAAGCTCGAAATCAAGACCACTACCCCAGCACCGAGGCCACCCACC |
| | | CCGGCTCCTACCATCGCCTCCCAGCCTCTGTCCCTGCGTCCGGAGGCA |
| | | TGTAGACCCGCAGCTGGTGGGGCCGTGCATACCCGGGGTCTTGACTTC |
| | | GCCTGCGATATCTACATTTGGGCCCCTCTGGCTGGTACTTGCGGGGTC |
| | | CTGCTGCTTTCACTCGTGATCACTCTTTACTGTAAGCGCGGTCGGAAG |
| | | AAGCTGCTGTACATCTTTAAGCAACCCTTCATGAGGCCTGTGCAGACT |
| | | ACTCAAGAGGAGGACGGCTGTTCATGCCGGTTCCCAGAGGAGGAGGAA |
| | | GGCGGCTGCGAACTGCGCGTGAAATTCAGCCGCAGCGCAGATGCTCCA |
| | | GCCTACAAGCAGGGGCAGAACCAGCTCTACAACGAACTCAATCTTGGT |
| | | CGGAGAGAGGAGTACGACGTGCTGGACAAGCGGAGAGGACGGGACCCA |
| | | GAAATGGGCGGGAAGCCGCGCAGAAAGAATCCCCAAGAGGGCCTGTAC |
| | | AACGAGCTCCAAAAGGATAAGATGGCAGAAGCCTATAGCGAGATTGGT |
| | | ATGAAAGGGGAACGCAGAAGAGGCAAAGGCCACGACGGACTGTACCAG |
| | | GGACTCAGCACCGCCACCAAGGACACCTATGACGCTCTTCACATGCAG |
| | | GCCCTGCCGCCTCGG |

BCMA_EBB-C1979-C1

| | | |
|---|---|---|
| BCMA_EB | 1551 | QVQLVESGGGLVQPGGSLRLSCAASGFTFSSYAMSWVRQAPGKGLEWV |
| B-C1979-C1- | | SAISGSGGSTYYADSVKGRFTISRDNAKNSLYLQMNSLRAEDTAIYYC |
| aa | | ARATYKRELRYYYGMDVWGQGTMVTVSSGGGGSGGGGSGGGGSEIVMT |
| ScFv | | QSPGTVSLSPGERATLSCRASQSVSSSFLAWYQQKPGQAPRLLIYGAS |
| domain | | SRATGIPDRFSGSGSGTDFTLTISRLEPEDSAVYYCQQYHSSPSWTFG |
| | | QGTRLEIK |
| BCMA_EB | 1552 | CAAGTGCAGCTCGTGGAATCGGGTGGCGGACTGGTGCAGCCGGGGGGC |
| B-C1979-C1- | | TCACTTAGACTGTCCTGCGCGGCCAGCGGATTCACTTTCTCCTCCTAC |
| nt | | GCCATGTCCTGGGTCAGACAGGCCCCTGGAAAGGGCCTGGAATGGGTG |
| ScFv | | TCCGCAATCAGCGGCAGCGGCGGCTCGACCTATTACGCGGATTCAGTG |
| domain | | AAGGGCAGATTCACCATTTCCCGGGACAACGCCAAGAACTCCTTGTAC |
| | | CTTCAAATGAACTCCCTCCGCGCGGAAGATACCGCAATCTACTACTGC |
| | | GCTCGGGCCACTTACAAGAGGGAACTGCGCTACTACTACGGGATGGAC |
| | | GTCTGGGGCCAGGGAACCATGGTCACCGTGTCCAGCGGAGGAGGAGGA |
| | | TCGGGAGGAGGCGGTAGCGGGGGTGGAGGGTCGGAGATCGTGATGACC |
| | | CAGTCCCCCGGCACTGTGTCGCTGTCCCCCGGCGAACGGGCCACCCTG |
| | | TCATGTCGGGCCAGCCAGTCAGTGTCGTCAAGCTTCCTCGCCTGGTAC |
| | | CAGCAGAAACCGGGACAAGCTCCCCGCCTGCTGATCTACGGAGCCAGC |
| | | AGCCGGGCCACCGGTATTCCTGACCGGTTCTCCGGTTCGGGGTCCGGG |
| | | ACCGACTTTACTCTGACTATCTCTCGCCTCGAGCCAGAGGACTCCGCC |
| | | GTGTATTACTGCCAGCAGTACCACTCCTCCCCGTCCTGGACGTTCGGA |
| | | CAGGGCACAAGGCTGGAGATTAAG |
| BCMA_EB | 1553 | QVQLVESGGGLVQPGGSLRLSCAASGFTFSSYAMSWVRQAPGKGLEWV |
| B-C1979-C1- | | SAISGSGGSTYYADSVKGRFTISRDNAKNSLYLQMNSLRAEDTAIYYC |
| aa | | ARATYKRELRYYYGMDVWGQGTMVTVSS |
| VH | | |
| BCMA_EB | 1554 | EIVMTQSPGTVSLSPGERATLSCRASQSVSSSFLAWYQQKPGQAPRLL |
| B-C1979-C1- | | IYGASSRATGIPDRFSGSGSGTDFTLTISRLEPEDSAVYYCQQYHSSP |
| aa | | SWTFGQGTRLEIK |
| VL | | |
| BCMA_EB | 1555 | MALPVTALLLPLALLLHAARPQVQLVESGGGLVQPGGSLRLSCAASGF |
| B-C1979-C1- | | TFSSYAMSWVRQAPGKGLEWVSAISGSGGSTYYADSVKGRFTISRDNA |
| aa | | KNSLYLQMNSLRAEDTAIYYCARATYKRELRYYYGMDVWGQGTMVTVS |
| Full CART | | SGGGGSGGGGSGGGGSEIVMTQSPGTVSLSPGERATLSCRASQSVSSS |
| | | FLAWYQQKPGQAPRLLIYGASSRATGIPDRFSGSGSGTDFTLTISRLE |
| | | PEDSAVYYCQQYHSSPSWTFGQGTRLEIKTTTPAPRPPTPAPTIASQP |
| | | LSLRPEACRPAAGGAVHTRGLDFACDIYIWAPLAGTCGVLLLSLVITL |
| | | YCKRGRKKLLYIFKQPFMRPVQTTQEEDGCSCRFPEEEEGGCELRVKF |
| | | SRSADAPAYKQGQNQLYNELNLGRREEYDVLDKRRGRDPEMGGKPRRK |
| | | NPQEGLYNELQKDKMAEAYSEIGMKGERRRGKGHDGLYQGLSTATKDT |
| | | YDALHMQALPPR |
| BCMA_EB | 1556 | ATGGCCCTCCCTGTCACCGCCCTGCTGCTTCCGCTGGCTCTTCTGCTC |
| B-C1979-C1- | | CACGCCGCTCGGCCCCAAGTGCAGCTCGTGGAATCGGGTGGCGGACTG |
| nt | | GTGCAGCCGGGGGGCTCACTTAGACTGTCCTGCGCGGCCAGCGGATTC |
| Full CART | | ACTTTCTCCTCCTACGCCATGTCCTGGGTCAGACAGGCCCCTGGAAAG |
| | | GGCCTGGAATGGGTGTCCGCAATCAGCGGCAGCGGCGGCTCGACCTAT |
| | | TACGCGGATTCAGTGAAGGGCAGATTCACCATTTCCCGGGACAACGCC |
| | | AAGAACTCCTTGTACCTTCAAATGAACTCCCTCCGCGCGGAAGATACC |
| | | GCAATCTACTACTGCGCTCGGGCCACTTACAAGAGGGAACTGCGCTAC |
| | | TACTACGGGATGGACGTCTGGGGCCAGGGAACCATGGTCACCGTGTCC |
| | | AGCGGAGGAGGAGGATCGGGAGGAGGCGGTAGCGGGGGTGGAGGGTCG |
| | | GAGATCGTGATGACCCAGTCCCCCGGCACTGTGTCGCTGTCCCCCGGC |
| | | GAACGGGCCACCCTGTCATGTCGGGCCAGCCAGTCAGTGTCGTCAAGC |
| | | TTCCTCGCCTGGTACCAGCAGAAACCGGGACAAGCTCCCCGCCTGCTG |
| | | ATCTACGGAGCCAGCAGCCGGGCCACCGGTATTCCTGACCGGTTCTCC |
| | | GGTTCGGGGTCCGGGACCGACTTTACTCTGACTATCTCTCGCCTCGAG |
| | | CCAGAGGACTCCGCCGTGTATTACTGCCAGCAGTACCACTCCTCCCCG |
| | | TCCTGGACGTTCGGACAGGGCACAAGGCTGGAGATTAAGACCACTACC |
| | | CCAGCACCGAGGCCACCCACCCCGGCTCCTACCATCGCCTCCCAGCCT |
| | | CTGTCCCTGCGTCCGGAGGCATGTAGACCCGCAGCTGGTGGGGCCGTG |
| | | CATACCCGGGGTCTTGACTTCGCCTGCGATATCTACATTTGGGCCCCT |
| | | CTGGCTGGTACTTGCGGGGTCCTGCTGCTTTCACTCGTGATCACTCTT |
| | | TACTGTAAGCGCGGTCGGAAGAAGCTGCTGTACATCTTTAAGCAACCC |
| | | TTCATGAGGCCTGTGCAGACTACTCAAGAGGAGGACGGCTGTTCATGC |
| | | CGGTTCCCAGAGGAGGAGGAAGGCGGCTGCGAACTGCGCGTGAAATTC |
| | | AGCCGCAGCGCAGATGCTCCAGCCTACAAGCAGGGGCAGAACCAGCTC |
| | | TACAACGAACTCAATCTTGGTCGGAGAGAGGAGTACGACGTGCTGGAC |
| | | AAGCGGAGAGGACGGGACCCAGAAATGGGCGGGAAGCCGCGCAGAAAG |
| | | AATCCCCAAGAGGGCCTGTACAACGAGCTCCAAAAGGATAAGATGGCA |
| | | GAAGCCTATAGCGAGATTGGTATGAAAGGGGAACGCAGAAGAGGCAAA |
| | | GGCCACGACGGACTGTACCAGGGACTCAGCACCGCCACCAAGGACACC |
| | | TATGACGCTCTTCACATGCAGGCCCTGCCGCCTCGG |

BCMA_EBB-C1978-C7

| | | |
|---|---|---|
| BCMA_EB | 1557 | EVQLVETGGGLVQPGGSLRLSCAASGFTFSSYAMSWVRQAPGKGLEWV |
| B-C1978-C7- | | SAISGSGGSTYYADSVKGRFTISRDNSKNTLYLQMNTLKAEDTAVYYC |
| aa | | ARATYKRELRYYYGMDVWGQGTTVTVSSGGGGSGGGGSGGGGSEIVLT |
| ScFv | | QSPSTLSLSPGESATLSCRASQSVSTTFLAWYQQKPGQAPRLLIYGSS |
| domain | | NRATGIPDRFSGSGSGTDFTLTIRRLEPEDFAVYYCQQYHSSPSWTFG |
| | | QGTKVEIK |
| BCMA_EB | 1558 | GAGGTGCAGCTTGTGGAAACCGGTGGCGGACTGGTGCAGCCCGGAGGA |
| B-C1978-C7- | | AGCCTCAGGCTGTCCTGCGCCGCGTCCGGCTTCACCTTCTCCTCGTAC |
| nt | | GCCATGTCCTGGGTCCGCCAGGCCCCCGGAAAGGGCCTGGAATGGGTG |
| ScFv | | TCCGCCATCTCTGGAAGCGGAGGTTCCACGTACTACGCGGACAGCGTC |
| domain | | AAGGGAAGGTTCACAATCTCCCGCGATAATTCGAAGAACACTCTGTAC |
| | | CTTCAAATGAACACCCTGAAGGCCGAGGACACTGCTGTGTACTACTGC |
| | | GCACGGGCCACCTACAAGAGAGAGCTCCGGTACTACTACGGAATGGAC |
| | | GTCTGGGGCCAGGGAACTACTGTGACCGTGTCCTCGGGAGGGGGTGGC |
| | | TCCGGGGGGGGCGGCTCCGGCGGAGGCGGTTCCGAGATTGTGCTGACC |
| | | CAGTCACCTTCAACTCTGTCGCTGTCCCCGGGAGAGAGCGCTACTCTG |
| | | AGCTGCCGGGCCAGCCAGTCCGTGTCCACCACCTTCCTCGCCTGGTAT |
| | | CAGCAGAAGCCGGGGCAGGCACCACGGCTCTTGATCTACGGGTCAAGC |
| | | AACAGAGCGACCGGAATTCCTGACCGCTTCTCGGGGAGCGGTTCAGGC |
| | | ACCGACTTCACCCTGACTATCCGGCGCCTGGAACCCGAAGATTTCGCC |
| | | GTGTATTACTGTCAACAGTACCACTCCTCGCCGTCCTGGACCTTTGGC |
| | | CAAGGAACCAAAGTGGAAATCAAG |
| BCMA_EB | 1559 | EVQLVETGGGLVQPGGSLRLSCAASGFTFSSYAMSWVRQAPGKGLEWV |
| B-C1978-C7- | | SAISGSGGSTYYADSVKGRFTISRDNSKNTLYLQMNTLKAEDTAVYYC |
| aa | | ARATYKRELRYYYGMDVWGQGTTVTVSS |
| VH | | |
| BCMA_EB | 1560 | EIVLTQSPSTLSLSPGESATLSCRASQSVSTTFLAWYQQKPGQAPRLL |
| B-C1978-C7- | | IYGSSNRATGIPDRFSGSGSGTDFTLTIRRLEPEDFAVYYCQQYHSSP |
| aa | | SWTFGQGTKVEIK |
| VL | | |
| BCMA_EB | 1561 | MALPVTALLLPLALLLHAARPEVQLVETGGGLVQPGGSLRLSCAASGF |
| B-C1978-C7- | | TFSSYAMSWVRQAPGKGLEWVSAISGSGGSTYYADSVKGRFTISRDNS |
| aa | | KNTLYLQMNTLKAEDTAVYYCARATYKRELRYYYGMDVWGQGTTVTVS |
| Full CART | | SGGGGSGGGGSGGGGSEIVLTQSPSTLSLSPGESATLSCRASQSVSTT |
| | | FLAWYQQKPGQAPRLLIYGSSNRATGIPDRFSGSGSGTDFTLTIRRLE |
| | | PEDFAVYYCQQYHSSPSWTFGQGTKVEIKTTTPAPRPPTPAPTIASQP |
| | | LSLRPEACRPAAGGAVHTRGLDFACDIYIWAPLAGTCGVLLLSLVITL |
| | | YCKRGRKKLLYIFKQPFMRPVQTTQEEDGCSCRFPEEEEGGCELRVKF |
| | | SRSADAPAYKQGQNQLYNELNLGRREEYDVLDKRRGRDPEMGGKPRRK |
| | | NPQEGLYNELQKDKMAEAYSEIGMKGERRRGKGHDGLYQGLSTATKDT |
| | | YDALHMQALPPR |
| BCMA_EB | 1562 | ATGGCCCTCCCTGTCACCGCCCTGCTGCTTCCGCTGGCTCTTCTGCTC |
| B-C1978-C7- | | CACGCCGCTCGGCCCGAGGTGCAGCTTGTGGAAACCGGTGGCGGACTG |
| nt | | GTGCAGCCCGGAGGAAGCCTCAGGCTGTCCTGCGCCGCGTCCGGCTTC |
| Full CART | | ACCTTCTCCTCGTACGCCATGTCCTGGGTCCGCCAGGCCCCCGGAAAG |
| | | GGCCTGGAATGGGTGTCCGCCATCTCTGGAAGCGGAGGTTCCACGTAC |
| | | TACGCGGACAGCGTCAAGGGAAGGTTCACAATCTCCCGCGATAATTCG |
| | | AAGAACACTCTGTACCTTCAAATGAACACCCTGAAGGCCGAGGACACT |
| | | GCTGTGTACTACTGCGCACGGGCCACCTACAAGAGAGAGCTCCGGTAC |
| | | TACTACGGAATGGACGTCTGGGGCCAGGGAACTACTGTGACCGTGTCC |
| | | TCGGGAGGGGGTGGCTCCGGGGGGGGCGGCTCCGGCGGAGGCGGTTCC |
| | | GAGATTGTGCTGACCCAGTCACCTTCAACTCTGTCGCTGTCCCCGGGA |
| | | GAGAGCGCTACTCTGAGCTGCCGGGCCAGCCAGTCCGTGTCCACCACC |
| | | TTCCTCGCCTGGTATCAGCAGAAGCCGGGGCAGGCACCACGGCTCTTG |
| | | ATCTACGGGTCAAGCAACAGAGCGACCGGAATTCCTGACCGCTTCTCG |
| | | GGGAGCGGTTCAGGCACCGACTTCACCCTGACTATCCGGCGCCTGGAA |
| | | CCCGAAGATTTCGCCGTGTATTACTGTCAACAGTACCACTCCTCGCCG |
| | | TCCTGGACCTTTGGCCAAGGAACCAAAGTGGAAATCAAGACCACTACC |
| | | CCAGCACCGAGGCCACCCACCCCGGCTCCTACCATCGCCTCCCAGCCT |
| | | CTGTCCCTGCGTCCGGAGGCATGTAGACCCGCAGCTGGTGGGGCCGTG |
| | | CATACCCGGGGTCTTGACTTCGCCTGCGATATCTACATTTGGGCCCCT |
| | | CTGGCTGGTACTTGCGGGGTCCTGCTGCTTTCACTCGTGATCACTCTT |
| | | TACTGTAAGCGCGGTCGGAAGAAGCTGCTGTACATCTTTAAGCAACCC |
| | | TTCATGAGGCCTGTGCAGACTACTCAAGAGGAGGACGGCTGTTCATGC |
| | | CGGTTCCCAGAGGAGGAGGAAGGCGGCTGCGAACTGCGCGTGAAATTC |
| | | AGCCGCAGCGCAGATGCTCCAGCCTACAAGCAGGGGCAGAACCAGCTC |
| | | TACAACGAACTCAATCTTGGTCGGAGAGAGGAGTACGACGTGCTGGAC |
| | | AAGCGGAGAGGACGGGACCCAGAAATGGGCGGGAAGCCGCGCAGAAAG |
| | | AATCCCCAAGAGGGCCTGTACAACGAGCTCCAAAAGGATAAGATGGCA |
| | | GAAGCCTATAGCGAGATTGGTATGAAAGGGGAACGCAGAAGAGGCAAA |
| | | GGCCACGACGGACTGTACCAGGGACTCAGCACCGCCACCAAGGACACC |
| | | TATGACGCTCTTCACATGCAGGCCCTGCCGCCTCGG |

BCMA_EBB-C1978-D10

| | | |
|---|---|---|
| BCMA_EB | 1563 | EVQLVETGGGLVQPGRSLRLSCAASGFTFDDYAMHWVRQAPGKGLEWV |
| B-C1978- | | SGISWNSGSIGYADSVKGRFTISRDNAKNSLYLQMNSLRDEDTAVYYC |
| D10-aa | | ARVGKAVPDVWGQGTTVTVSSGGGGSGGGGSGGGGSDIVMTQTPSSLS |
| ScFv | | ASVGDRVTITCRASQSISSYLNWYQQKPGKAPKLLIYAASSLQSGVPS |
| domain | | RFSGSGSGTDFTLTISSLQPEDFATYYCQQSYSTPYSFGQGTRLEIK |
| BCMA_EB | 1564 | GAAGTGCAGCTCGTGGAAACTGGAGGTGGACTCGTGCAGCCTGGACGG |
| B-C1978- | | TCGCTGCGGCTGAGCTGCGCTGCATCCGGCTTCACCTTCGACGATTAT |
| D10-nt | | GCCATGCACTGGGTCAGACAGGCGCCAGGGAAGGGACTTGAGTGGGTG |
| ScFv | | TCCGGTATCAGCTGGAATAGCGGCTCAATCGGATACGCGGACTCCGTG |
| domain | | AAGGGAAGGTTCACCATTTCCCGCGACAACGCCAAGAACTCCCTGTAC |
| | | TTGCAAATGAACAGCCTCCGGGATGAGGACACTGCCGTGTACTACTGC |
| | | GCCCGCGTCGGAAAAGCTGTGCCCGACGTCTGGGGCCAGGGAACCACT |
| | | GTGACCGTGTCCAGCGGCGGGGGTGGATCGGGCGGTGGAGGGTCCGGT |
| | | GGAGGGGGCTCAGATATTGTGATGACCCAGACCCCCTCGTCCCTGTCC |
| | | GCCTCGGTCGGCGACCGCGTGACTATCACATGTAGAGCCTCGCAGAGC |
| | | ATCTCCAGCTACCTGAACTGGTATCAGCAGAAGCCGGGGAAGGCCCCG |
| | | AAGCTCCTGATCTACGCGGCATCATCACTGCAATCGGGAGTGCCGAGC |
| | | CGGTTTTCCGGGTCCGGCTCCGGCACCGACTTCACGCTGACCATTTCT |
| | | TCCCTGCAACCCGAGGACTTCGCCACTTACTACTGCCAGCAGTCCTAC |
| | | TCCACCCCTTACTCCTTCGGCCAAGGAACCAGGCTGGAAATCAAG |
| BCMA_EB | 1565 | EVQLVETGGGLVQPGRSLRLSCAASGFTFDDYAMHWVRQAPGKGLEWV |
| B-C1978- | | SGISWNSGSIGYADSVKGRFTISRDNAKNSLYLQMNSLRDEDTAVYYC |
| D10-aa | | ARVGKAVPDVWGQGTTVTVSS |
| VH | | |
| BCMA_EB | 1566 | DIVMTQTPSSLSASVGDRVTITCRASQSISSYLNWYQQKPGKAPKLLI |
| B-C1978- | | YAASSLQSGVPSRFSGSGSGTDFTLTISSLQPEDFATYYCQQSYSTPY |
| D10-aa | | SFGQGTRLEIK |
| VL | | |
| BCMA_EB | 1567 | MALPVTALLLPLALLLHAARPEVQLVETGGGLVQPGRSLRLSCAASGF |
| B-C1978- | | TFDDYAMHWVRQAPGKGLEWVSGISWNSGSIGYADSVKGRFTISRDNA |
| D10-aa | | KNSLYLQMNSLRDEDTAVYYCARVGKAVPDVWGQGTTVTVSSGGGGSG |
| Full CART | | GGGSGGGGSDIVMTQTPSSLSASVGDRVTITCRASQSISSYLNWYQQK |
| | | PGKAPKLLIYAASSLQSGVPSRFSGSGSGTDFTLTISSLQPEDFATYY |
| | | CQQSYSTPYSFGQGTRLEIKTTTPAPRPPTPAPTIASQPLSLRPEACR |
| | | PAAGGAVHTRGLDFACDIYIWAPLAGTCGVLLLSLVITLYCKRGRKKL |
| | | LYIFKQPFMRPVQTTQEEDGCSCRFPEEEEGGCELRVKFSRSADAPAY |
| | | KQGQNQLYNELNLGRREEYDVLDKRRGRDPEMGGKPRRKNPQEGLYNE |
| | | LQKDKMAEAYSEIGMKGERRRGKGHDGLYQGLSTATKDTYDALHMQAL |
| | | PPR |
| BCMA_EB | 1568 | ATGGCCCTCCCTGTCACCGCCCTGCTGCTTCCGCTGGCTCTTCTGCTC |
| B-C1978- | | CACGCCGCTCGGCCCGAAGTGCAGCTCGTGGAAACTGGAGGTGGACTC |
| D10-nt | | GTGCAGCCTGGACGGTCGCTGCGGCTGAGCTGCGCTGCATCCGGCTTC |
| Full CART | | ACCTTCGACGATTATGCCATGCACTGGGTCAGACAGGCGCCAGGGAAG |
| | | GGACTTGAGTGGGTGTCCGGTATCAGCTGGAATAGCGGCTCAATCGGA |
| | | TACGCGGACTCCGTGAAGGGAAGGTTCACCATTTCCCGCGACAACGCC |
| | | AAGAACTCCCTGTACTTGCAAATGAACAGCCTCCGGGATGAGGACACT |
| | | GCCGTGTACTACTGCGCCCGCGTCGGAAAAGCTGTGCCCGACGTCTGG |
| | | GGCCAGGGAACCACTGTGACCGTGTCCAGCGGCGGGGGTGGATCGGGC |
| | | GGTGGAGGGTCCGGTGGAGGGGGCTCAGATATTGTGATGACCCAGACC |
| | | CCCTCGTCCCTGTCCGCCTCGGTCGGCGACCGCGTGACTATCACATGT |
| | | AGAGCCTCGCAGAGCATCTCCAGCTACCTGAACTGGTATCAGCAGAAG |
| | | CCGGGGAAGGCCCCGAAGCTCCTGATCTACGCGGCATCATCACTGCAA |
| | | TCGGGAGTGCCGAGCCGGTTTTCCGGGTCCGGCTCCGGCACCGACTTC |
| | | ACGCTGACCATTTCTTCCCTGCAACCCGAGGACTTCGCCACTTACTAC |
| | | TGCCAGCAGTCCTACTCCACCCCTTACTCCTTCGGCCAAGGAACCAGG |
| | | CTGGAAATCAAGACCACTACCCCAGCACCGAGGCCACCCACCCCGGCT |
| | | CCTACCATCGCCTCCCAGCCTCTGTCCCTGCGTCCGGAGGCATGTAGA |
| | | CCCGCAGCTGGTGGGGCCGTGCATACCCGGGGTCTTGACTTCGCCTGC |
| | | GATATCTACATTTGGGCCCCTCTGGCTGGTACTTGCGGGGTCCTGCTG |
| | | CTTTCACTCGTGATCACTCTTTACTGTAAGCGCGGTCGGAAGAAGCTG |
| | | CTGTACATCTTTAAGCAACCCTTCATGAGGCCTGTGCAGACTACTCAA |
| | | GAGGAGGACGGCTGTTCATGCCGGTTCCCAGAGGAGGAGGAAGGCGGC |
| | | TGCGAACTGCGCGTGAAATTCAGCCGCAGCGCAGATGCTCCAGCCTAC |
| | | AAGCAGGGGCAGAACCAGCTCTACAACGAACTCAATCTTGGTCGGAGA |
| | | GAGGAGTACGACGTGCTGGACAAGCGGAGAGGACGGGACCCAGAAATG |
| | | GGCGGGAAGCCGCGCAGAAAGAATCCCCAAGAGGGCCTGTACAACGAG |
| | | CTCCAAAAGGATAAGATGGCAGAAGCCTATAGCGAGATTGGTATGAAA |
| | | GGGGAACGCAGAAGAGGCAAAGGCCACGACGGACTGTACCAGGGACTC |
| | | AGCACCGCCACCAAGGACACCTATGACGCTCTTCACATGCAGGCCCTG |
| | | CCGCCTCGG |

BCMA_EBB-C1979-C12

| | | |
|---|---|---|
| BCMA_EB | 1569 | EVQLVESGGGLVQPGRSLRLSCTASGFTFDDYAMHWVRQRPGKGLEWV |
| B-C1979- | | ASINWKGNSLAYGDSVKGRFAISRDNAKNTVFLQMNSLRTEDTAVYYC |
| C12-aa | | ASHQGVAYYNYAMDVWGRGTLVTVSSGGGGSGGGGSGGGGSEIVLTQS |
| ScFv | | PGTLSLSPGERATLSCRATQSIGSSFLAWYQQRPGQAPRLLIYGASQR |
| domain | | ATGIPDRFSGRGSGTDFTLTISRVEPEDSAVYYCQHYESSPSWTFGQG |
| | | TKVEIK |
| BCMA_EB | 1570 | GAAGTGCAGCTCGTGGAGAGCGGGGGAGGATTGGTGCAGCCCGGAAGG |
| B-C1979- | | TCCCTGCGGCTCTCCTGCACTGCGTCTGGCTTCACCTTCGACGACTAC |
| C12-nt | | GCGATGCACTGGGTCAGACAGCGCCCGGGAAAGGGCCTGGAATGGGTC |
| ScFv | | GCCTCAATCAACTGGAAGGGAAACTCCCTGGCCTATGGCGACAGCGTG |
| domain | | AAGGGCCGCTTCGCCATTTCGCGCGACAACGCCAAGAACACCGTGTTT |
| | | CTGCAAATGAATTCCCTGCGGACCGAGGATACCGCTGTGTACTACTGC |
| | | GCCAGCCACCAGGGCGTGGCATACTATAACTACGCCATGGACGTGTGG |
| | | GGAAGAGGGACGCTCGTCACCGTGTCCTCCGGGGGCGGTGGATCGGGT |
| | | GGAGGAGGAAGCGGTGGCGGGGGCAGCGAAATCGTGCTGACTCAGAGC |
| | | CCGGGAACTCTTTCACTGTCCCCGGGAGAACGGGCCACTCTCTCGTGC |
| | | CGGGCCACCCAGTCCATCGGCTCCTCCTTCCTTGCCTGGTACCAGCAG |
| | | AGGCCAGGACAGGCGCCCCGCCTGCTGATCTACGGTGCTTCCCAACGC |
| | | GCCACTGGCATTCCTGACCGGTTCAGCGGCAGAGGGTCGGGAACCGAT |
| | | TTCACACTGACCATTTCCCGGGTGGAGCCCGAAGATTCGGCAGTCTAC |
| | | TACTGTCAGCATTACGAGTCCTCCCCTTCATGGACCTTCGGTCAAGGG |
| | | ACCAAAGTGGAGATCAAG |
| BCMA_EB | 1571 | EVQLVESGGGLVQPGRSLRLSCTASGFTFDDYAMHWVRQRPGKGLEWV |
| B-C1979- | | ASINWKGNSLAYGDSVKGRFAISRDNAKNTVFLQMNSLRTEDTAVYYC |
| C12-aa | | ASHQGVAYYNYAMDVWGRGTLVTVSS |
| VH | | |
| BCMA_EB | 1572 | EIVLTQSPGTLSLSPGERATLSCRATQSIGSSFLAWYQQRPGQAPRLL |
| B-C1979- | | IYGASQRATGIPDRFSGRGSGTDFTLTISRVEPEDSAVYYCQHYESSP |
| C12-aa | | SWTFGQGTKVEIK |
| VL | | |
| BCMA_EB | 1573 | MALPVTALLLPLALLLHAARPEVQLVESGGGLVQPGRSLRLSCTASGF |
| B-C1979- | | TFDDYAMHWVRQRPGKGLEWVASINWKGNSLAYGDSVKGRFAISRDNA |
| C12-aa | | KNTVFLQMNSLRTEDTAVYYCASHQGVAYYNYAMDVWGRGTLVTVSSG |
| Full CART | | GGGSGGGGSGGGGSEIVLTQSPGTLSLSPGERATLSCRATQSIGSSFL |
| | | AWYQQRPGQAPRLLIYGASQRATGIPDRFSGRGSGTDFTLTISRVEPE |
| | | DSAVYYCQHYESSPSWTFGQGTKVEIKTTTPAPRPPTPAPTIASQPLS |
| | | LRPEACRPAAGGAVHTRGLDFACDIYIWAPLAGTCGVLLLSLVITLYC |
| | | KRGRKKLLYIFKQPFMRPVQTTQEEDGCSCRFPEEEEGGCELRVKFSR |
| | | SADAPAYKQGQNQLYNELNLGRREEYDVLDKRRGRDPEMGGKPRRKNP |
| | | QEGLYNELQKDKMAEAYSEIGMKGERRRGKGHDGLYQGLSTATKDTYD |
| | | ALHMQALPPR |
| BCMA_EB | 1574 | ATGGCCCTCCCTGTCACCGCCCTGCTGCTTCCGCTGGCTCTTCTGCTC |
| B-C1979- | | CACGCCGCTCGGCCCGAAGTGCAGCTCGTGGAGAGCGGGGGAGGATTG |
| C12-nt | | GTGCAGCCCGGAAGGTCCCTGCGGCTCTCCTGCACTGCGTCTGGCTTC |
| Full CART | | ACCTTCGACGACTACGCGATGCACTGGGTCAGACAGCGCCCGGGAAAG |
| | | GGCCTGGAATGGGTCGCCTCAATCAACTGGAAGGGAAACTCCCTGGCC |
| | | TATGGCGACAGCGTGAAGGGCCGCTTCGCCATTTCGCGCGACAACGCC |
| | | AAGAACACCGTGTTTCTGCAAATGAATTCCCTGCGGACCGAGGATACC |
| | | GCTGTGTACTACTGCGCCAGCCACCAGGGCGTGGCATACTATAACTAC |
| | | GCCATGGACGTGTGGGGAAGAGGGACGCTCGTCACCGTGTCCTCCGGG |
| | | GGCGGTGGATCGGGTGGAGGAGGAAGCGGTGGCGGGGGCAGCGAAATC |
| | | GTGCTGACTCAGAGCCCGGGAACTCTTTCACTGTCCCCGGGAGAACGG |
| | | GCCACTCTCTCGTGCCGGGCCACCCAGTCCATCGGCTCCTCCTTCCTT |
| | | GCCTGGTACCAGCAGAGGCCAGGACAGGCGCCCCGCCTGCTGATCTAC |
| | | GGTGCTTCCCAACGCGCCACTGGCATTCCTGACCGGTTCAGCGGCAGA |
| | | GGGTCGGGAACCGATTTCACACTGACCATTTCCCGGGTGGAGCCCGAA |
| | | GATTCGGCAGTCTACTACTGTCAGCATTACGAGTCCTCCCCTTCATGG |
| | | ACCTTCGGTCAAGGGACCAAAGTGGAGATCAAGACCACTACCCCAGCA |
| | | CCGAGGCCACCCACCCCGGCTCCTACCATCGCCTCCCAGCCTCTGTCC |
| | | CTGCGTCCGGAGGCATGTAGACCCGCAGCTGGTGGGGCCGTGCATACC |
| | | CGGGGTCTTGACTTCGCCTGCGATATCTACATTTGGGCCCCTCTGGCT |
| | | GGTACTTGCGGGGTCCTGCTGCTTTCACTCGTGATCACTCTTTACTGT |
| | | AAGCGCGGTCGGAAGAAGCTGCTGTACATCTTTAAGCAACCCTTCATG |
| | | AGGCCTGTGCAGACTACTCAAGAGGAGGACGGCTGTTCATGCCGGTTC |
| | | CCAGAGGAGGAGGAAGGCGGCTGCGAACTGCGCGTGAAATTCAGCCGC |
| | | AGCGCAGATGCTCCAGCCTACAAGCAGGGGCAGAACCAGCTCTACAAC |
| | | GAACTCAATCTTGGTCGGAGAGAGGAGTACGACGTGCTGGACAAGCGG |
| | | AGAGGACGGGACCCAGAAATGGGCGGGAAGCCGCGCAGAAAGAATCCC |
| | | CAAGAGGGCCTGTACAACGAGCTCCAAAAGGATAAGATGGCAGAAGCC |
| | | TATAGCGAGATTGGTATGAAAGGGGAACGCAGAAGAGGCAAAGGCCAC |
| | | GACGGACTGTACCAGGGACTCAGCACCGCCACCAAGGACACCTATGAC |
| | | GCTCTTCACATGCAGGCCCTGCCGCCTCGG |

BCMA_EBB-C1980-G4

| | | |
|---|---|---|
| BCMA EB | 1575 | EVQLVESGGGLVQPGGSLRLSCAASGFTFSSYAMSWVRQAPGKGLEWV |
| B-C1980- | | SAISGSGGSTYYADSVKGRFTISRDNSKNTLYLQMNSLRAEDTAVYYC |
| G4-aa | | AKVVRDGMDVWGQGTTVTVSSGGGGSGGGGSGGGGSEIVLTQSPATLS |
| ScFv | | LSPGERATLSCRASQSVSSSYLAWYQQKPGQAPRLLIYGASSRATGIP |
| domain | | DRFSGNGSGTDFTLTISRLEPEDFAVYYCQQYGSPPRFTFGPGTKVDI |
| | | K |
| BCMA_EB | 1576 | GAGGTGCAGTTGGTCGAAAGCGGGGGCGGGCTTGTGCAGCCTGGCGGA |
| B-C1980- | | TCACTGCGGCTGTCCTGCGCGGCATCAGGCTTCACGTTTTCTTCCTAC |
| G4-nt | | GCCATGTCCTGGGTGCGCCAGGCCCCTGGAAAGGGACTGGAATGGGTG |
| ScFv | | TCCGCGATTTCGGGGTCCGGCGGGAGCACCTACTACGCCGATTCCGTG |
| domain | | AAGGGCCGCTTCACTATCTCGCGGGACAACTCCAAGAACACCCTCTAC |
| | | CTCCAAATGAATAGCCTGCGGGCCGAGGATACCGCCGTCTACTATTGC |
| | | GCTAAGGTCGTGCGCGACGGAATGGACGTGTGGGGACAGGGTACCACC |
| | | GTGACAGTGTCCTCGGGGGGAGGCGGTAGCGGCGGAGGAGGAAGCGGT |
| | | GGTGGAGGTTCCGAGATTGTGCTGACTCAATCACCCGCGACCCTGAGC |
| | | CTGTCCCCCGGCGAAAGGGCCACTCTGTCCTGTCGGGCCAGCCAATCA |
| | | GTCTCCTCCTCGTACCTGGCCTGGTACCAGCAGAAGCCAGGACAGGCT |
| | | CCGAGACTCCTTATCTATGGCGCATCCTCCCGCGCCACCGGAATCCCG |
| | | GATAGGTTCTCGGGAAACGGATCGGGGACCGACTTCACTCTCACCATC |
| | | TCCCGGCTGGAACCGGAGGACTTCGCCGTGTACTACTGCCAGCAGTAC |
| | | GGCAGCCCGCCTAGATTCACTTTCGGCCCCGGCACCAAAGTGGACATC |
| | | AAG |
| BCMA_EB | 1577 | EVQLVESGGGLVQPGGSLRLSCAASGFTFSSYAMSWVRQAPGKGLEWV |
| B-C1980- | | SAISGSGGSTYYADSVKGRFTISRDNSKNTLYLQMNSLRAEDTAVYYC |
| G4-aa | | AKVVRDGMDVWGQGTTVTVSS |
| VH | | |
| BCMA_EB | 1578 | EIVLTQSPATLSLSPGERATLSCRASQSVSSSYLAWYQQKPGQAPRLL |
| B-C1980- | | IYGASSRATGIPDRFSGNGSGTDFTLTISRLEPEDFAVYYCQQYGSPP |
| G4-aa | | RFTFGPGTKVDIK |
| VL | | |
| BCMA_EB | 1579 | MALPVTALLLPLALLLHAARPEVQLVESGGGLVQPGGSLRLSCAASGF |
| B-C1980- | | TFSSYAMSWVRQAPGKGLEWVSAISGSGGSTYYADSVKGRFTISRDNS |
| G4-aa | | KNTLYLQMNSLRAEDTAVYYCAKVVRDGMDVWGQGTTVTVSSGGGGSG |
| Full CART | | GGGSGGGGSEIVLTQSPATLSLSPGERATLSCRASQSVSSSYLAWYQQ |
| | | KPGQAPRLLIYGASSRATGIPDRFSGNGSGTDFTLTISRLEPEDFAVY |
| | | YCQQYGSPPRFTFGPGTKVDIKTTTPAPRPPTPAPTIASQPLSLRPEA |
| | | CRPAAGGAVHTRGLDFACDIYIWAPLAGTCGVLLLSLVITLYCKRGRK |
| | | KLLYIFKQPFMRPVQTTQEEDGCSCRFPEEEEGGCELRVKFSRSADAP |
| | | AYKQGQNQLYNELNLGRREEYDVLDKRRGRDPEMGGKPRRKNPQEGLY |
| | | NELQKDKMAEAYSEIGMKGERRRGKGHDGLYQGLSTATKDTYDALHMQ |
| | | ALPPR |
| BCMA_EB | 1580 | ATGGCCCTCCCTGTCACCGCCCTGCTGCTTCCGCTGGCTCTTCTGCTC |
| B-C1980- | | CACGCCGCTCGGCCCGAGGTGCAGTTGGTCGAAAGCGGGGGCGGGCTT |
| G4-nt | | GTGCAGCCTGGCGGATCACTGCGGCTGTCCTGCGCGGCATCAGGCTTC |
| Full CART | | ACGTTTTCTTCCTACGCCATGTCCTGGGTGCGCCAGGCCCCTGGAAAG |
| | | GGACTGGAATGGGTGTCCGCGATTTCGGGGTCCGGCGGGAGCACCTAC |
| | | TACGCCGATTCCGTGAAGGGCCGCTTCACTATCTCGCGGGACAACTCC |
| | | AAGAACACCCTCTACCTCCAAATGAATAGCCTGCGGGCCGAGGATACC |
| | | GCCGTCTACTATTGCGCTAAGGTCGTGCGCGACGGAATGGACGTGTGG |
| | | GGACAGGGTACCACCGTGACAGTGTCCTCGGGGGGAGGCGGTAGCGGC |
| | | GGAGGAGGAAGCGGTGGTGGAGGTTCCGAGATTGTGCTGACTCAATCA |
| | | CCCGCGACCCTGAGCCTGTCCCCCGGCGAAAGGGCCACTCTGTCCTGT |
| | | CGGGCCAGCCAATCAGTCTCCTCCTCGTACCTGGCCTGGTACCAGCAG |
| | | AAGCCAGGACAGGCTCCGAGACTCCTTATCTATGGCGCATCCTCCCGC |
| | | GCCACCGGAATCCCGGATAGGTTCTCGGGAAACGGATCGGGGACCGAC |
| | | TTCACTCTCACCATCTCCCGGCTGGAACCGGAGGACTTCGCCGTGTAC |
| | | TACTGCCAGCAGTACGGCAGCCCGCCTAGATTCACTTTCGGCCCCGGC |
| | | ACCAAAGTGGACATCAAGACCACTACCCCAGCACCGAGGCCACCCACC |
| | | CCGGCTCCTACCATCGCCTCCCAGCCTCTGTCCCTGCGTCCGGAGGCA |
| | | TGTAGACCCGCAGCTGGTGGGGCCGTGCATACCCGGGGTCTTGACTTC |
| | | GCCTGCGATATCTACATTTGGGCCCCTCTGGCTGGTACTTGCGGGGTC |
| | | CTGCTGCTTTCACTCGTGATCACTCTTTACTGTAAGCGCGGTCGGAAG |
| | | AAGCTGCTGTACATCTTTAAGCAACCCTTCATGAGGCCTGTGCAGACT |
| | | ACTCAAGAGGAGGACGGCTGTTCATGCCGGTTCCCAGAGGAGGAGGAA |
| | | GGCGGCTGCGAACTGCGCGTGAAATTCAGCCGCAGCGCAGATGCTCCA |
| | | GCCTACAAGCAGGGGCAGAACCAGCTCTACAACGAACTCAATCTTGGT |
| | | CGGAGAGAGGAGTACGACGTGCTGGACAAGCGGAGAGGACGGGACCCA |
| | | GAAATGGGCGGGAAGCCGCGCAGAAAGAATCCCCAAGAGGGCCTGTAC |
| | | AACGAGCTCCAAAAGGATAAGATGGCAGAAGCCTATAGCGAGATTGGT |
| | | ATGAAAGGGGAACGCAGAAGAGGCAAAGGCCACGACGGACTGTACCAG |
| | | GGACTCAGCACCGCCACCAAGGACACCTATGACGCTCTTCACATGCAG |
| | | GCCCTGCCGCCTCGG |

BCMA_EBB-C1980-D2

| | | |
|---|---|---|
| BCMA_EB | 1581 | EVQLLESGGGLVQPGGSLRLSCAASGFTFSSYAMSWVRQAPGKGLEWV |
| B-C1980- | | SAISGSGGSTYYADSVKGRFTISRDNSKNTLYLQMNSLRAEDTAVYYC |
| D2-aa | | AKIPQTGTFDYWGQGTLVTVSSGGGGSGGGGSGGGGSEIVLTQSPGTL |
| ScFv | | SLSPGERATLSCRASQSVSSSYLAWYQQRPGQAPRLLIYGASSRATGI |
| domain | | PDRFSGSGSGTDFTLTISRLEPEDFAVYYCQHYGSSPSWTFGQGTRLE |
| | | IK |
| BCMA_EB | 1582 | GAAGTGCAGCTGCTGGAGTCCGGCGGTGGATTGGTGCAACCGGGGGGA |
| B-C1980- | | TCGCTCAGACTGTCCTGTGCGGCGTCAGGCTTCACCTTCTCGAGCTAC |
| D2-nt | | GCCATGTCATGGGTCAGACAGGCCCCTGGAAAGGGTCTGGAATGGGTG |
| ScFv | | TCCGCCATTTCCGGGAGCGGGGGATCTACATACTACGCCGATAGCGTG |
| domain | | AAGGGCCGCTTCACCATTTCCCGGGACAACTCCAAGAACACTCTCTAT |
| | | CTGCAAATGAACTCCCTCCGCGCTGAGGACACTGCCGTGTACTACTGC |
| | | GCCAAAATCCCTCAGACCGGCACCTTCGACTACTGGGGACAGGGGACT |
| | | CTGGTCACCGTCAGCAGCGGTGGCGGAGGTTCGGGGGGAGGAGGAAGC |
| | | GGCGGCGGAGGGTCCGAGATTGTGCTGACCCAGTCACCCGGCACTTTG |
| | | TCCCTGTCGCCTGGAGAAAGGGCCACCCTTTCCTGCCGGGCATCCCAA |
| | | TCCGTGTCCTCCTCGTACCTGGCCTGGTACCAGCAGAGGCCCGGACAG |
| | | GCCCCACGGCTTCTGATCTACGGAGCAAGCAGCCGCGCGACCGGTATC |
| | | CCGGACCGGTTTTCGGGCTCGGGCTCAGGAACTGACTTCACCCTCACC |
| | | ATCTCCCGCCTGGAACCCGAAGATTTCGCTGTGTATTACTGCCAGCAC |
| | | TACGGCAGCTCCCCGTCCTGGACGTTCGGCCAGGGAACTCGGCTGGAG |
| | | ATCAAG |
| BCMA_EB | 1583 | EVQLLESGGGLVQPGGSLRLSCAASGFTFSSYAMSWVRQAPGKGLEWV |
| B-C1980- | | SAISGSGGSTYYADSVKGRFTISRDNSKNTLYLQMNSLRAEDTAVYYC |
| D2-aa | | AKIPQTGTFDYWGQGTLVTVSS |
| VH | | |
| BCMA_EB | 1584 | EIVLTQSPGTLSLSPGERATLSCRASQSVSSSYLAWYQQRPGQAPRLL |
| B-C1980- | | IYGASSRATGIPDRFSGSGSGTDFTLTISRLEPEDFAVYYCQHYGSSP |
| D2-aa | | SWTFGQGTRLEIK |
| VL | | |
| BCMA_EB | 1585 | MALPVTALLLPLALLLHAARPEVQLLESGGGLVQPGGSLRLSCAASGF |
| B-C1980- | | TESSYAMSWVRQAPGKGLEWVSAISGSGGSTYYADSVKGRETISRDNS |
| D2-aa | | KNTLYLQMNSLRAEDTAVYYCAKIPQTGTFDYWGQGTLVTVSSGGGGS |
| Full CART | | GGGGSGGGGSEIVLTQSPGTLSLSPGERATLSCRASQSVSSSYLAWYQ |
| | | QRPGQAPRLLIYGASSRATGIPDRFSGSGSGTDFTLTISRLEPEDFAV |
| | | YYCQHYGSSPSWTFGQGTRLEIKTTTPAPRPPTPAPTIASQPLSLRPE |
| | | ACRPAAGGAVHTRGLDFACDIYIWAPLAGTCGVLLLSLVITLYCKRGR |
| | | KKLLYIFKQPFMRPVQTTQEEDGCSCREPEEEEGGCELRVKFSRSADA |
| | | PAYKQGQNQLYNELNLGRREEYDVLDKRRGRDPEMGGKPRRKNPQEGL |
| | | YNELQKDKMAEAYSEIGMKGERRRGKGHDGLYQGLSTATKDTYDALHM |
| | | QALPPR |
| BCMA_EB | 1586 | ATGGCCCTCCCTGTCACCGCCCTGCTGCTTCCGCTGGCTCTTCTGCTC |
| B-C1980- | | CACGCCGCTCGGCCCGAAGTGCAGCTGCTGGAGTCCGGCGGTGGATTG |
| D2-nt | | GTGCAACCGGGGGGATCGCTCAGACTGTCCTGTGCGGCGTCAGGCTTC |
| Full CART | | ACCTTCTCGAGCTACGCCATGTCATGGGTCAGACAGGCCCCTGGAAAG |
| | | GGTCTGGAATGGGTGTCCGCCATTTCCGGGAGCGGGGGATCTACATAC |
| | | TACGCCGATAGCGTGAAGGGCCGCTTCACCATTTCCCGGGACAACTCC |
| | | AAGAACACTCTCTATCTGCAAATGAACTCCCTCCGCGCTGAGGACACT |
| | | GCCGTGTACTACTGCGCCAAAATCCCTCAGACCGGCACCTTCGACTAC |
| | | TGGGGACAGGGGACTCTGGTCACCGTCAGCAGCGGTGGCGGAGGTTCG |
| | | GGGGGAGGAGGAAGCGGCGGCGGAGGGTCCGAGATTGTGCTGACCCAG |
| | | TCACCCGGCACTTTGTCCCTGTCGCCTGGAGAAAGGGCCACCCTTTCC |
| | | TGCCGGGCATCCCAATCCGTGTCCTCCTCGTACCTGGCCTGGTACCAG |
| | | CAGAGGCCCGGACAGGCCCCACGGCTTCTGATCTACGGAGCAAGCAGC |
| | | CGCGCGACCGGTATCCCGGACCGGTTTTCGGGCTCGGGCTCAGGAACT |
| | | GACTTCACCCTCACCATCTCCCGCCTGGAACCCGAAGATTTCGCTGTG |
| | | TATTACTGCCAGCACTACGGCAGCTCCCCGTCCTGGACGTTCGGCCAG |
| | | GGAACTCGGCTGGAGATCAAGACCACTACCCCAGCACCGAGGCCACCC |
| | | ACCCCGGCTCCTACCATCGCCTCCCAGCCTCTGTCCCTGCGTCCGGAG |
| | | GCATGTAGACCCGCAGCTGGTGGGGCCGTGCATACCCGGGGTCTTGAC |
| | | TTCGCCTGCGATATCTACATTTGGGCCCCTCTGGCTGGTACTTGCGGG |
| | | GTCCTGCTGCTTTCACTCGTGATCACTCTTTACTGTAAGCGCGGTCGG |
| | | AAGAAGCTGCTGTACATCTTTAAGCAACCCTTCATGAGGCCTGTGCAG |
| | | ACTACTCAAGAGGAGGACGGCTGTTCATGCCGGTTCCCAGAGGAGGAG |
| | | GAAGGCGGCTGCGAACTGCGCGTGAAATTCAGCCGCAGCGCAGATGCT |
| | | CCAGCCTACAAGCAGGGGCAGAACCAGCTCTACAACGAACTCAATCTT |
| | | GGTCGGAGAGAGGAGTACGACGTGCTGGACAAGCGGAGAGGACGGGAC |
| | | CCAGAAATGGGCGGGAAGCCGCGCAGAAAGAATCCCCAAGAGGGCCTG |
| | | TACAACGAGCTCCAAAAGGATAAGATGGCAGAAGCCTATAGCGAGATT |
| | | GGTATGAAAGGGGAACGCAGAAGAGGCAAAGGCCACGACGGACTGTAC |
| | | CAGGGACTCAGCACCGCCACCAAGGACACCTATGACGCTCTTCACATG |
| | | CAGGCCCTGCCGCCTCGG |

BCMA_EBB-C1978-A10

| | | |
|---|---|---|
| BCMA_EB | 1587 | EVQLVETGGGLVQPGGSLRLSCAASGFTFSSYAMSWVRQAPGKGLEWV |
| B-C1978- | | SAISGSGGSTYYADSVKGRFTMSRENDKNSVFLQMNSLRVEDTGVYYC |
| A10-aa | | ARANYKRELRYYYGMDVWGQGTMVTVSSGGGGSGGGGSGGGGSEIVMT |
| ScFv | | QSPGTLSLSPGESATLSCRASQRVASNYLAWYQHKPGQAPSLLISGAS |
| domain | | SRATGVPDRFSGSGSGTDFTLAISRLEPEDSAVYYCQHYDSSPSWTFG |
| | | QGTKVEIK |
| BCMA_EB | 1588 | GAAGTGCAACTGGTGGAAACCGGTGGAGGACTCGTGCAGCCTGGCGGC |
| B-C1978- | | AGCCTCCGGCTGAGCTGCGCCGCTTCGGGATTCACCTTTTCCTCCTAC |
| A10-nt | | GCGATGTCTTGGGTCAGACAGGCCCCCGGAAAGGGGCTGGAATGGGTG |
| ScFv | | TCAGCCATCTCCGGCTCCGGCGGATCAACGTACTACGCCGACTCCGTG |
| domain | | AAAGGCCGGTTCACCATGTCGCGCGAGAATGACAAGAACTCCGTGTTC |
| | | CTGCAAATGAACTCCCTGAGGGTGGAGGACACCGGAGTGTACTATTGT |
| | | GCGCGCGCCAACTACAAGAGAGAGCTGCGGTACTACTACGGAATGGAC |
| | | GTCTGGGGACAGGGAACTATGGTGACCGTGTCATCCGGTGGAGGGGGA |
| | | AGCGGCGGTGGAGGCAGCGGGGGCGGGGGTTCAGAAATTGTCATGACC |
| | | CAGTCCCCGGGAACTCTTTCCCTCTCCCCCGGGGAATCCGCGACTTTG |
| | | TCCTGCCGGGCCAGCCAGCGCGTGGCCTCGAACTACCTCGCATGGTAC |
| | | CAGCATAAGCCAGGCCAAGCCCCTTCCCTGCTGATTTCCGGGGCTAGC |
| | | AGCCGCGCCACTGGCGTGCCGGATAGGTTCTCGGGAAGCGGCTCGGGT |
| | | ACCGATTTCACCCTGGCAATCTCGCGGCTGGAACCGGAGGATTCGGCC |
| | | GTGTACTACTGCCAGCACTATGACTCATCCCCCTCCTGGACATTCGGA |
| | | CAGGGCACCAAGGTCGAGATCAAG |
| BCMA_EB | 1589 | EVQLVETGGGLVQPGGSLRLSCAASGFTFSSYAMSWVRQAPGKGLEWV |
| B-C1978- | | SAISGSGGSTYYADSVKGRFTMSRENDKNSVFLQMNSLRVEDTGVYYC |
| A10-aa | | ARANYKRELRYYYGMDVWGQGTMVTVSS |
| VH | | |
| BCMA_EB | 1590 | EIVMTQSPGTLSLSPGESATLSCRASQRVASNYLAWYQHKPGQAPSLL |
| B-C1978- | | ISGASSRATGVPDRFSGSGSGTDFTLAISRLEPEDSAVYYCQHYDSSP |
| A10-aa | | SWTFGQGTKVEIK |
| VL | | |
| BCMA_EB | 1591 | MALPVTALLLPLALLLHAARPEVQLVETGGGLVQPGGSLRLSCAASGF |
| B-C1978- | | TFSSYAMSWVRQAPGKGLEWVSAISGSGGSTYYADSVKGRFTMSREND |
| A10-aa | | KNSVFLQMNSLRVEDTGVYYCARANYKRELRYYYGMDVWGQGTMVTVS |
| Full CART | | SGGGGSGGGGSGGGGSEIVMTQSPGTLSLSPGESATLSCRASQRVASN |
| | | YLAWYQHKPGQAPSLLISGASSRATGVPDRFSGSGSGTDFTLAISRLE |
| | | PEDSAVYYCQHYDSSPSWTFGQGTKVEIKTTTPAPRPPTPAPTIASQP |
| | | LSLRPEACRPAAGGAVHTRGLDFACDIYIWAPLAGTCGVLLLSLVITL |
| | | YCKRGRKKLLYIFKQPFMRPVQTTQEEDGCSCRFPEEEEGGCELRVKF |
| | | SRSADAPAYKQGQNQLYNELNLGRREEYDVLDKRRGRDPEMGGKPRRK |
| | | NPQEGLYNELQKDKMAEAYSEIGMKGERRRGKGHDGLYQGLSTATKDT |
| | | YDALHMQALPPR |
| BCMA_EB | 1592 | ATGGCCCTCCCTGTCACCGCCCTGCTGCTTCCGCTGGCTCTTCTGCTC |
| B-C1978- | | CACGCCGCTCGGCCCGAAGTGCAACTGGTGGAAACCGGTGGAGGACTC |
| A10-nt | | GTGCAGCCTGGCGGCAGCCTCCGGCTGAGCTGCGCCGCTTCGGGATTC |
| Full CART | | ACCTTTTCCTCCTACGCGATGTCTTGGGTCAGACAGGCCCCCGGAAAG |
| | | GGGCTGGAATGGGTGTCAGCCATCTCCGGCTCCGGCGGATCAACGTAC |
| | | TACGCCGACTCCGTGAAAGGCCGGTTCACCATGTCGCGCGAGAATGAC |
| | | AAGAACTCCGTGTTCCTGCAAATGAACTCCCTGAGGGTGGAGGACACC |
| | | GGAGTGTACTATTGTGCGCGCGCCAACTACAAGAGAGAGCTGCGGTAC |
| | | TACTACGGAATGGACGTCTGGGGACAGGGAACTATGGTGACCGTGTCA |
| | | TCCGGTGGAGGGGGAAGCGGCGGTGGAGGCAGCGGGGGCGGGGGTTCA |
| | | GAAATTGTCATGACCCAGTCCCCGGGAACTCTTTCCCTCTCCCCCGGG |
| | | GAATCCGCGACTTTGTCCTGCCGGGCCAGCCAGCGCGTGGCCTCGAAC |
| | | TACCTCGCATGGTACCAGCATAAGCCAGGCCAAGCCCCTTCCCTGCTG |
| | | ATTTCCGGGGCTAGCAGCCGCGCCACTGGCGTGCCGGATAGGTTCTCG |
| | | GGAAGCGGCTCGGGTACCGATTTCACCCTGGCAATCTCGCGGCTGGAA |
| | | CCGGAGGATTCGGCCGTGTACTACTGCCAGCACTATGACTCATCCCCC |
| | | TCCTGGACATTCGGACAGGGCACCAAGGTCGAGATCAAGACCACTACC |
| | | CCAGCACCGAGGCCACCCACCCCGGCTCCTACCATCGCCTCCCAGCCT |
| | | CTGTCCCTGCGTCCGGAGGCATGTAGACCCGCAGCTGGTGGGGCCGTG |
| | | CATACCCGGGGTCTTGACTTCGCCTGCGATATCTACATTTGGGCCCCT |
| | | CTGGCTGGTACTTGCGGGGTCCTGCTGCTTTCACTCGTGATCACTCTT |
| | | TACTGTAAGCGCGGTCGGAAGAAGCTGCTGTACATCTTTAAGCAACCC |
| | | TTCATGAGGCCTGTGCAGACTACTCAAGAGGAGGACGGCTGTTCATGC |
| | | CGGTTCCCAGAGGAGGAGGAAGGCGGCTGCGAACTGCGCGTGAAATTC |
| | | AGCCGCAGCGCAGATGCTCCAGCCTACAAGCAGGGGCAGAACCAGCTC |
| | | TACAACGAACTCAATCTTGGTCGGAGAGAGGAGTACGACGTGCTGGAC |
| | | AAGCGGAGAGGACGGGACCCAGAAATGGGCGGGAAGCCGCGCAGAAAG |
| | | AATCCCCAAGAGGGCCTGTACAACGAGCTCCAAAAGGATAAGATGGCA |
| | | GAAGCCTATAGCGAGATTGGTATGAAAGGGGAACGCAGAAGAGGCAAA |
| | | GGCCACGACGGACTGTACCAGGGACTCAGCACCGCCACCAAGGACACC |
| | | TATGACGCTCTTCACATGCAGGCCCTGCCGCCTCGG |

BCMA_EBB-C1978-D4

| | | |
|---|---|---|
| BCMA_EB | 1593 | EVQLLETGGGLVQPGGSLRLSCAASGFSFSSYAMSWVRQAPGKGLEWV |
| B-C1978- | | SAISGSGGSTYYADSVKGRFTISRDNSKNTLYLQMNSLRAEDTAVYYC |
| D4-aa | | AKALVGATGAFDIWGQGTLVTVSSGGGGSGGGGSGGGGSEIVLTQSPG |
| ScFv | | TLSLSPGERATLSCRASQSLSSNFLAWYQQKPGQAPGLLIYGASNWAT |
| domain | | GTPDRFSGSGSGTDFTLTITRLEPEDFAVYYCQYYGTSPMYTFGQGTK |
| | | VEIK |
| BCMA_EB | 1594 | GAAGTGCAGCTGCTCGAAACCGGTGGAGGGCTGGTGCAGCCAGGGGGC |
| B-C1978- | | TCCCTGAGGCTTTCATGCGCCGCTAGCGGATTCTCCTTCTCCTCTTAC |
| D4-nt | | GCCATGTCGTGGGTCCGCCAAGCCCCTGGAAAAGGCCTGGAATGGGTG |
| ScFv | | TCCGCGATTTCCGGGAGCGGAGGTTCGACCTATTACGCCGACTCCGTG |
| domain | | AAGGGCCGCTTTACCATCTCCCGGGATAACTCCAAGAACACTCTGTAC |
| | | CTCCAAATGAACTCGCTGAGAGCCGAGGACACCGCCGTGTATTACTGC |
| | | GCGAAGGCGCTGGTCGGCGCGACTGGGGCATTCGACATCTGGGGACAG |
| | | GGAACTCTTGTGACCGTGTCGAGCGGAGGCGGCGGCTCCGGCGGAGGA |
| | | GGGAGCGGGGGCGGTGGTTCCGAAATCGTGTTGACTCAGTCCCCGGGA |
| | | ACCCTGAGCTTGTCACCCGGGGAGCGGGCCACTCTCTCCTGTCGCGCC |
| | | TCCCAATCGCTCTCATCCAATTTCCTGGCCTGGTACCAGCAGAAGCCC |
| | | GGACAGGCCCCGGGCCTGCTCATCTACGGCGCTTCAAACTGGGCAACG |
| | | GGAACCCCTGATCGGTTCAGCGGAAGCGGATCGGGTACTGACTTTACC |
| | | CTGACCATCACCAGACTGGAACCGGAGGACTTCGCCGTGTACTACTGC |
| | | CAGTACTACGGCACCTCCCCCATGTACACATTCGGACAGGGTACCAAG |
| | | GTCGAGATTAAG |
| BCMA_EB | 1595 | EVQLLETGGGLVQPGGSLRLSCAASGFSFSSYAMSWVRQAPGKGLEWV |
| B-C1978- | | SAISGSGGSTYYADSVKGRFTISRDNSKNTLYLQMNSLRAEDTAVYYC |
| D4-aa | | AKALVGATGAFDIWGQGTLVTVSS |
| VH | | |
| BCMA_EB | 1596 | EIVLTQSPGTLSLSPGERATLSCRASQSLSSNFLAWYQQKPGQAPGLL |
| B-C1978- | | IYGASNWATGTPDRFSGSGSGTDFTLTITRLEPEDFAVYYCQYYGTSP |
| D4-aa | | MYTFGQGTKVEIK |
| VL | | |
| BCMA_EB | 1597 | MALPVTALLLPLALLLHAARPEVQLLETGGGLVQPGGSLRLSCAASGF |
| B-C1978- | | SFSSYAMSWVRQAPGKGLEWVSAISGSGGSTYYADSVKGRFTISRDNS |
| D4-aa | | KNTLYLQMNSLRAEDTAVYYCAKALVGATGAFDIWGQGTLVTVSSGGG |
| Full CART | | GSGGGGSGGGGSEIVLTQSPGTLSLSPGERATLSCRASQSLSSNFLAW |
| | | YQQKPGQAPGLLIYGASNWATGTPDRFSGSGSGTDFTLTITRLEPEDF |
| | | AVYYCQYYGTSPMYTFGQGTKVEIKTTTPAPRPPTPAPTIASQPLSLR |
| | | PEACRPAAGGAVHTRGLDFACDIYIWAPLAGTCGVLLLSLVITLYCKR |
| | | GRKKLLYIFKQPFMRPVQTTQEEDGCSCRFPEEEEGGCELRVKFSRSA |
| | | DAPAYKQGQNQLYNELNLGRREEYDVLDKRRGRDPEMGGKPRRKNPQE |
| | | GLYNELQKDKMAEAYSEIGMKGERRRGKGHDGLYQGLSTATKDTYDAL |
| | | HMQALPPR |
| BCMA_EB | 1598 | ATGGCCCTCCCTGTCACCGCCCTGCTGCTTCCGCTGGCTCTTCTGCTC |
| B-C1978- | | CACGCCGCTCGGCCCGAAGTGCAGCTGCTCGAAACCGGTGGAGGGCTG |
| D4-nt | | GTGCAGCCAGGGGGCTCCCTGAGGCTTTCATGCGCCGCTAGCGGATTC |
| Full CART | | TCCTTCTCCTCTTACGCCATGTCGTGGGTCCGCCAAGCCCCTGGAAAA |
| | | GGCCTGGAATGGGTGTCCGCGATTTCCGGGAGCGGAGGTTCGACCTAT |
| | | TACGCCGACTCCGTGAAGGGCCGCTTTACCATCTCCCGGGATAACTCC |
| | | AAGAACACTCTGTACCTCCAAATGAACTCGCTGAGAGCCGAGGACACC |
| | | GCCGTGTATTACTGCGCGAAGGCGCTGGTCGGCGCGACTGGGGCATTC |
| | | GACATCTGGGGACAGGGAACTCTTGTGACCGTGTCGAGCGGAGGCGGC |
| | | GGCTCCGGCGGAGGAGGGAGCGGGGGCGGTGGTTCCGAAATCGTGTTG |
| | | ACTCAGTCCCCGGGAACCCTGAGCTTGTCACCCGGGGAGCGGGCCACT |
| | | CTCTCCTGTCGCGCCTCCCAATCGCTCTCATCCAATTTCCTGGCCTGG |
| | | TACCAGCAGAAGCCCGGACAGGCCCCGGGCCTGCTCATCTACGGCGCT |
| | | TCAAACTGGGCAACGGGAACCCCTGATCGGTTCAGCGGAAGCGGATCG |
| | | GGTACTGACTTTACCCTGACCATCACCAGACTGGAACCGGAGGACTTC |
| | | GCCGTGTACTACTGCCAGTACTACGGCACCTCCCCCATGTACACATTC |
| | | GGACAGGGTACCAAGGTCGAGATTAAGACCACTACCCCAGCACCGAGG |
| | | CCACCCACCCCGGCTCCTACCATCGCCTCCCAGCCTCTGTCCCTGCGT |
| | | CCGGAGGCATGTAGACCCGCAGCTGGTGGGGCCGTGCATACCCGGGGT |
| | | CTTGACTTCGCCTGCGATATCTACATTTGGGCCCCTCTGGCTGGTACT |
| | | TGCGGGGTCCTGCTGCTTTCACTCGTGATCACTCTTTACTGTAAGCGC |
| | | GGTCGGAAGAAGCTGCTGTACATCTTTAAGCAACCCTTCATGAGGCCT |
| | | GTGCAGACTACTCAAGAGGAGGACGGCTGTTCATGCCGGTTCCCAGAG |
| | | GAGGAGGAAGGCGGCTGCGAACTGCGCGTGAAATTCAGCCGCAGCGCA |
| | | GATGCTCCAGCCTACAAGCAGGGGCAGAACCAGCTCTACAACGAACTC |
| | | AATCTTGGTCGGAGAGAGGAGTACGACGTGCTGGACAAGCGGAGAGGA |
| | | CGGGACCCAGAAATGGGCGGGAAGCCGCGCAGAAAGAATCCCCAAGAG |
| | | GGCCTGTACAACGAGCTCCAAAAGGATAAGATGGCAGAAGCCTATAGC |
| | | GAGATTGGTATGAAAGGGGAACGCAGAAGAGGCAAAGGCCACGACGGA |
| | | CTGTACCAGGGACTCAGCACCGCCACCAAGGACACCTATGACGCTCTT |
| | | CACATGCAGGCCCTGCCGCCTCGG |

BCMA_EBB-C1980-A2

| | | |
|---|---|---|
| BCMA_EB | 1599 | EVQLLESGGGLVQPGGSLRLSCAASGFTFSSYAMSWVRQAPGKGLEWV |
| B-C1980- | | SAISGSGGSTYYADSVKGRFTISRDNSKNTLYLQMNSLRAEDTAVYYC |
| A2-aa | | VLWFGEGFDPWGQGTLVTVSSGGGGSGGGGSGGGGSDIVLTQSPLSLP |
| ScFv | | VTPGEPASISCRSSQSLLHSNGYNYLDWYLQKPGQSPQLLIYLGSNRA |
| domain | | SGVPDRFSGSGSGTDFTLKISRVEAEDVGVYYCMQALQTPLTFGGGTK |
| | | VDIK |
| BCMA_EB | 1600 | GAAGTGCAGCTGCTTGAGAGCGGTGGAGGTCTGGTGCAGCCCGGGGGA |
| B-C1980- | | TCACTGCGCCTGTCCTGTGCCGCGTCCGGTTTCACTTTCTCCTCGTAC |
| A2-nt | | GCCATGTCGTGGGTCAGACAGGCACCGGGAAAGGGACTGGAATGGGTG |
| ScFv | | TCAGCCATTTCGGGTTCGGGGGGCAGCACCTACTACGCTGACTCCGTG |
| domain | | AAGGGCCGGTTCACCATTTCCCGCGACAACTCCAAGAACACCTTGTAC |
| | | CTCCAAATGAACTCCCTGCGGGCCGAAGATACCGCCGTGTATTACTGC |
| | | GTGCTGTGGTTCGGAGAGGGATTCGACCCGTGGGGACAAGGAACACTC |
| | | GTGACTGTGTCATCCGGCGGAGGCGGCAGCGGTGGCGGCGGTTCCGGC |
| | | GGCGGCGGATCTGACATCGTGTTGACCCAGTCCCCTCTGAGCCTGCCG |
| | | GTCACTCCTGGCGAACCAGCCAGCATCTCCTGCCGGTCGAGCCAGTCC |
| | | CTCCTGCACTCCAATGGGTACAACTACCTCGATTGGTATCTGCAAAAG |
| | | CCGGGCCAGAGCCCCCAGCTGCTGATCTACCTTGGGTCAAACCGCGCT |
| | | TCCGGGGTGCCTGATAGATTCTCCGGGTCCGGGAGCGGAACCGACTTT |
| | | ACCCTGAAAATCTCGAGGGTGGAGGCCGAGGACGTCGGAGTGTACTAC |
| | | TGCATGCAGGCGCTCCAGACTCCCCTGACCTTCGGAGGAGGAACGAAG |
| | | GTCGACATCAAGA |
| BCMA_EB | 1601 | EVQLLESGGGLVQPGGSLRLSCAASGFTFSSYAMSWVRQAPGKGLEWV |
| B-C1980- | | SAISGSGGSTYYADSVKGRFTISRDNSKNTLYLQMNSLRAEDTAVYYC |
| A2-aa | | VLWFGEGFDPWGQGTLVTVSS |
| VH | | |
| BCMA_EB | 1602 | DIVLTQSPLSLPVTPGEPASISCRSSQSLLHSNGYNYLDWYLQKPGQS |
| B-C1980- | | PQLLIYLGSNRASGVPDRFSGSGSGTDFTLKISRVEAEDVGVYYCMQA |
| A2-aa | | LQTPLTFGGGTKVDIK |
| VL | | |
| BCMA_EB | 1603 | MALPVTALLLPLALLLHAARPEVQLLESGGGLVQPGGSLRLSCAASGF |
| B-C1980- | | TFSSYAMSWVRQAPGKGLEWVSAISGSGGSTYYADSVKGRFTISRDNS |
| A2-aa | | KNTLYLQMNSLRAEDTAVYYCVLWFGEGFDPWGQGTLVTVSSGGGGSG |
| Full CART | | GGGSGGGGSDIVLTQSPLSLPVTPGEPASISCRSSQSLLHSNGYNYLD |
| | | WYLQKPGQSPQLLIYLGSNRASGVPDRFSGSGSGTDFTLKISRVEAED |
| | | VGVYYCMQALQTPLTFGGGTKVDIKTTTPAPRPPTPAPTIASQPLSLR |
| | | PEACRPAAGGAVHTRGLDFACDIYIWAPLAGTCGVLLLSLVITLYCKR |
| | | GRKKLLYIFKQPFMRPVQTTQEEDGCSCRFPEEEEGGCELRVKFSRSA |
| | | DAPAYKQGQNQLYNELNLGRREEYDVLDKRRGRDPEMGGKPRRKNPQE |
| | | GLYNELQKDKMAEAYSEIGMKGERRRGKGHDGLYQGLSTATKDTYDAL |
| | | HMQALPPR |
| BCMA_EB | 1604 | ATGGCCCTCCCTGTCACCGCCCTGCTGCTTCCGCTGGCTCTTCTGCTC |
| B-C1980- | | CACGCCGCTCGGCCCGAAGTGCAGCTGCTTGAGAGCGGTGGAGGTCTG |
| A2-nt | | GTGCAGCCCGGGGGATCACTGCGCCTGTCCTGTGCCGCGTCCGGTTTC |
| Full CART | | ACTTTCTCCTCGTACGCCATGTCGTGGGTCAGACAGGCACCGGGAAAG |
| | | GGACTGGAATGGGTGTCAGCCATTTCGGGTTCGGGGGGCAGCACCTAC |
| | | TACGCTGACTCCGTGAAGGGCCGGTTCACCATTTCCCGCGACAACTCC |
| | | AAGAACACCTTGTACCTCCAAATGAACTCCCTGCGGGCCGAAGATACC |
| | | GCCGTGTATTACTGCGTGCTGTGGTTCGGAGAGGGATTCGACCCGTGG |
| | | GGACAAGGAACACTCGTGACTGTGTCATCCGGCGGAGGCGGCAGCGGT |
| | | GGCGGCGGTTCCGGCGGCGGCGGATCTGACATCGTGTTGACCCAGTCC |
| | | CCTCTGAGCCTGCCGGTCACTCCTGGCGAACCAGCCAGCATCTCCTGC |
| | | CGGTCGAGCCAGTCCCTCCTGCACTCCAATGGGTACAACTACCTCGAT |
| | | TGGTATCTGCAAAAGCCGGGCCAGAGCCCCCAGCTGCTGATCTACCTT |
| | | GGGTCAAACCGCGCTTCCGGGGTGCCTGATAGATTCTCCGGGTCCGGG |
| | | AGCGGAACCGACTTTACCCTGAAAATCTCGAGGGTGGAGGCCGAGGAC |
| | | GTCGGAGTGTACTACTGCATGCAGGCGCTCCAGACTCCCCTGACCTTC |
| | | GGAGGAGGAACGAAGGTCGACATCAAGACCACTACCCCAGCACCGAGG |
| | | CCACCCACCCCGGCTCCTACCATCGCCTCCCAGCCTCTGTCCCTGCGT |
| | | CCGGAGGCATGTAGACCCGCAGCTGGTGGGGCCGTGCATACCCGGGGT |
| | | CTTGACTTCGCCTGCGATATCTACATTTGGGCCCCTCTGGCTGGTACT |
| | | TGCGGGGTCCTGCTGCTTTCACTCGTGATCACTCTTTACTGTAAGCGC |
| | | GGTCGGAAGAAGCTGCTGTACATCTTTAAGCAACCCTTCATGAGGCCT |
| | | GTGCAGACTACTCAAGAGGAGGACGGCTGTTCATGCCGGTTCCCAGAG |
| | | GAGGAGGAAGGCGGCTGCGAACTGCGCGTGAAATTCAGCCGCAGCGCA |
| | | GATGCTCCAGCCTACAAGCAGGGGCAGAACCAGCTCTACAACGAACTC |
| | | AATCTTGGTCGGAGAGAGGAGTACGACGTGCTGGACAAGCGGAGAGGA |
| | | CGGGACCCAGAAATGGGCGGGAAGCCGCGCAGAAAGAATCCCCAAGAG |
| | | GGCCTGTACAACGAGCTCCAAAAGGATAAGATGGCAGAAGCCTATAGC |
| | | GAGATTGGTATGAAAGGGGAACGCAGAAGAGGCAAAGGCCACGACGGA |
| | | CTGTACCAGGGACTCAGCACCGCCACCAAGGACACCTATGACGCTCTT |
| | | CACATGCAGGCCCTGCCGCCTCGG |

BCMA_EBB-C1981-C3

| | | |
|---|---|---|
| BCMA_EB | 1605 | QVQLVESGGGLVQPGGSLRLSCAASGFTFSSYAMSWVRQAPGKGLEWV |
| B-C1981- | | SAISGSGGSTYYADSVKGRFTISRDNSKNTLYLQMNSLRAEDTAVYYC |
| C3-aa | | AKVGYDSSGYYRDYYGMDVWGQGTTVTVSSGGGGSGGGGSGGGGSEIV |
| ScFv | | LTQSPGTLSLSPGERATLSCRASQSVSSSYLAWYQQKPGQAPRLLIYG |
| domain | | TSSRATGISDRFSGSGSGTDFTLTISRLEPEDFAVYYCQHYGNSPPKF |
| | | TFGPGTKLEIK |
| BCMA_EB | 1606 | CAAGTGCAGCTCGTGGAGTCAGGCGGAGGACTGGTGCAGCCCGGGGGC |
| B-C1981- | | TCCCTGAGACTTTCCTGCGCGGCATCGGGTTTTACCTTCTCCTCCTAT |
| C3-nt | | GCTATGTCCTGGGTGCGCCAGGCCCCGGGAAAGGGACTGGAATGGGTG |
| ScFv | | TCCGCAATCAGCGGTAGCGGGGGCTCAACATACTACGCCGACTCCGTC |
| domain | | AAGGGTCGCTTCACTATTTCCCGGGACAACTCCAAGAATACCCTGTAC |
| | | CTCCAAATGAACAGCCTCAGGGCCGAGGATACTGCCGTGTACTACTGC |
| | | GCCAAAGTCGGATACGATAGCTCCGGTTACTACCGGGACTACTACGGA |
| | | ATGGACGTGTGGGGACAGGGCACCACCGTGACCGTGTCAAGCGGCGGA |
| | | GGCGGTTCAGGAGGGGGAGGCTCCGGCGGTGGAGGGTCCGAAATCGTC |
| | | CTGACTCAGTCGCCTGGCACTCTGTCGTTGTCCCCGGGGGAGCGCGCT |
| | | ACCCTGTCGTGTCGGGCGTCGCAGTCCGTGTCGAGCTCCTACCTCGCG |
| | | TGGTACCAGCAGAAGCCCGGACAGGCCCCTAGACTTCTGATCTACGGC |
| | | ACTTCTTCACGCGCCACCGGGATCAGCGACAGGTTCAGCGGCTCCGGC |
| | | TCCGGGACCGACTTCACCCTGACCATTAGCCGGCTGGAGCCTGAAGAT |
| | | TTCGCCGTGTATTACTGCCAACACTACGGAAACTCGCCGCCAAAGTTC |
| | | ACGTTCGGACCCGGAACCAAGCTGGAAATCAAG |
| BCMA_EB | 1607 | QVQLVESGGGLVQPGGSLRLSCAASGFTFSSYAMSWVRQAPGKGLEWV |
| B-C1981- | | SAISGSGGSTYYADSVKGRFTISRDNSKNTLYLQMNSLRAEDTAVYYC |
| C3-aa | | AKVGYDSSGYYRDYYGMDVWGQGTTVTVSS |
| VH | | |
| BCMA_EB | 1608 | EIVLTQSPGTLSLSPGERATLSCRASQSVSSSYLAWYQQKPGQAPRLL |
| B-C1981- | | IYGTSSRATGISDRFSGSGSGTDFTLTISRLEPEDFAVYYCQHYGNSP |
| C3-aa | | PKFTFGPGTKLEIK |
| VL | | |
| BCMA_EB | 1609 | MALPVTALLLPLALLLHAARPQVQLVESGGGLVQPGGSLRLSCAASGF |
| B-C1981- | | TFSSYAMSWVRQAPGKGLEWVSAISGSGGSTYYADSVKGRFTISRDNS |
| C3-aa | | KNTLYLQMNSLRAEDTAVYYCAKVGYDSSGYYRDYYGMDVWGQGTTVT |
| Full CART | | VSSGGGGSGGGGSGGGGSEIVLTQSPGTLSLSPGERATLSCRASQSVS |
| | | SSYLAWYQQKPGQAPRLLIYGTSSRATGISDRFSGSGSGTDFTLTISR |
| | | LEPEDFAVYYCQHYGNSPPKFTFGPGTKLEIKTTTPAPRPPTPAPTIA |
| | | SQPLSLRPEACRPAAGGAVHTRGLDFACDIYIWAPLAGTCGVLLLSLV |
| | | ITLYCKRGRKKLLYIFKQPFMRPVQTTQEEDGCSCRFPEEEEGGCELR |
| | | VKFSRSADAPAYKQGQNQLYNELNLGRREEYDVLDKRRGRDPEMGGKP |
| | | RRKNPQEGLYNELQKDKMAEAYSEIGMKGERRRGKGHDGLYQGLSTAT |
| | | KDTYDALHMQALPPR |
| BCMA_EB | 1610 | ATGGCCCTCCCTGTCACCGCCCTGCTGCTTCCGCTGGCTCTTCTGCTC |
| B-C1981- | | CACGCCGCTCGGCCCCAAGTGCAGCTCGTGGAGTCAGGCGGAGGACTG |
| C3-nt | | GTGCAGCCCGGGGGCTCCCTGAGACTTTCCTGCGCGGCATCGGGTTTT |
| Full CART | | ACCTTCTCCTCCTATGCTATGTCCTGGGTGCGCCAGGCCCCGGGAAAG |
| | | GGACTGGAATGGGTGTCCGCAATCAGCGGTAGCGGGGGCTCAACATAC |
| | | TACGCCGACTCCGTCAAGGGTCGCTTCACTATTTCCCGGGACAACTCC |
| | | AAGAATACCCTGTACCTCCAAATGAACAGCCTCAGGGCCGAGGATACT |
| | | GCCGTGTACTACTGCGCCAAAGTCGGATACGATAGCTCCGGTTACTAC |
| | | CGGGACTACTACGGAATGGACGTGTGGGGACAGGGCACCACCGTGACC |
| | | GTGTCAAGCGGCGGAGGCGGTTCAGGAGGGGGAGGCTCCGGCGGTGGA |
| | | GGGTCCGAAATCGTCCTGACTCAGTCGCCTGGCACTCTGTCGTTGTCC |
| | | CCGGGGGAGCGCGCTACCCTGTCGTGTCGGGCGTCGCAGTCCGTGTCG |
| | | AGCTCCTACCTCGCGTGGTACCAGCAGAAGCCCGGACAGGCCCCTAGA |
| | | CTTCTGATCTACGGCACTTCTTCACGCGCCACCGGGATCAGCGACAGG |
| | | TTCAGCGGCTCCGGCTCCGGGACCGACTTCACCCTGACCATTAGCCGG |
| | | CTGGAGCCTGAAGATTTCGCCGTGTATTACTGCCAACACTACGGAAAC |
| | | TCGCCGCCAAAGTTCACGTTCGGACCCGGAACCAAGCTGGAAATCAAG |
| | | ACCACTACCCCAGCACCGAGGCCACCCACCCCGGCTCCTACCATCGCC |
| | | TCCCAGCCTCTGTCCCTGCGTCCGGAGGCATGTAGACCCGCAGCTGGT |
| | | GGGGCCGTGCATACCCGGGGTCTTGACTTCGCCTGCGATATCTACATT |
| | | TGGGCCCCTCTGGCTGGTACTTGCGGGGTCCTGCTGCTTTCACTCGTG |
| | | ATCACTCTTTACTGTAAGCGCGGTCGGAAGAAGCTGCTGTACATCTTT |
| | | AAGCAACCCTTCATGAGGCCTGTGCAGACTACTCAAGAGGAGGACGGC |
| | | TGTTCATGCCGGTTCCCAGAGGAGGAGGAAGGCGGCTGCGAACTGCGC |
| | | GTGAAATTCAGCCGCAGCGCAGATGCTCCAGCCTACAAGCAGGGGCAG |
| | | AACCAGCTCTACAACGAACTCAATCTTGGTCGGAGAGAGGAGTACGAC |
| | | GTGCTGGACAAGCGGAGAGGACGGGACCCAGAAATGGGCGGGAAGCCG |
| | | CGCAGAAAGAATCCCCAAGAGGGCCTGTACAACGAGCTCCAAAAGGAT |
| | | AAGATGGCAGAAGCCTATAGCGAGATTGGTATGAAAGGGGAACGCAGA |
| | | AGAGGCAAAGGCCACGACGGACTGTACCAGGGACTCAGCACCGCCACC |
| | | AAGGACACCTATGACGCTCTTCACATGCAGGCCCTGCCGCCTCGG |

BCMA_EBB-C1978-G4

| | | |
|---|---|---|
| BCMA_EB | 1611 | EVQLVESGGGLVQPGGSLRLSCAASGFTFSSYAMSWVRQAPGKGLEWV |
| B-C1978- | | SAISGSGGSTYYADSVKGRFTISRDNSKNTLYLQMNSLRAEDTAVYYC |
| G4-aa | | AKMGWSSGYLGAFDIWGQGTTVTVSSGGGGSGGGGSGGGGSEIVLTQS |
| ScFv | | PGTLSLSPGERATLSCRASQSVASSFLAWYQQKPGQAPRLLIYGASGR |
| domain | | ATGIPDRFSGSGSGTDFTLTISRLEPEDFAVYYCQHYGGSPRLTFGGG |
| | | TKVDIK |
| BCMA_EB | 1612 | GAAGTCCAACTGGTGGAGTCCGGGGGAGGGCTCGTGCAGCCCGGAGGC |
| B-C1978- | | AGCCTTCGGCTGTCGTGCGCCGCCTCCGGGTTCACGTTCTCATCCTAC |
| G4-nt | | GCGATGTCGTGGGTCAGACAGGCACCAGGAAAGGGACTGGAATGGGTG |
| ScFv | | TCCGCCATTAGCGGCTCCGGCGGTAGCACCTACTATGCCGACTCAGTG |
| domain | | AAGGGAAGGTTCACTATCTCCCGCGACAACAGCAAGAACACCCTGTAC |
| | | CTCCAAATGAACTCTCTGCGGGCCGAGGATACCGCGGTGTACTATTGC |
| | | GCCAAGATGGGTTGGTCCAGCGGATACTTGGGAGCCTTCGACATTTGG |
| | | GGACAGGGCACTACTGTGACCGTGTCCTCCGGGGGTGGCGGATCGGGA |
| | | GGCGGCGGCTCGGGTGGAGGGGGTTCCGAAATCGTGTTGACCCAGTCA |
| | | CCGGGAACCCTCTCGCTGTCCCCGGGAGAACGGGCTACACTGTCATGT |
| | | AGAGCGTCCCAGTCCGTGGCTTCCTCGTTCCTGGCCTGGTACCAGCAG |
| | | AAGCCGGGACAGGCACCCCGCCTGCTCATCTACGGAGCCAGCGGCCGG |
| | | GCGACCGGCATCCCTGACCGCTTCTCCGGTTCCGGCTCGGGCACCGAC |
| | | TTTACTCTGACCATTAGCAGGCTTGAGCCCGAGGATTTTGCCGTGTAC |
| | | TACTGCCAACACTACGGGGGGAGCCCTCGCCTGACCTTCGGAGGCGGA |
| | | ACTAAGGTCGATATCAAAA |
| BCMA_EB | 1613 | EVQLVESGGGLVQPGGSLRLSCAASGFTFSSYAMSWVRQAPGKGLEWV |
| B-C1978- | | SAISGSGGSTYYADSVKGRFTISRDNSKNTLYLQMNSLRAEDTAVYYC |
| G4-aa | | AKMGWSSGYLGAFDIWGQGTTVTVSS |
| VH | | |
| BCMA_EB | 1614 | EIVLTQSPGTLSLSPGERATLSCRASQSVASSFLAWYQQKPGQAPRLL |
| B-C1978- | | IYGASGRATGIPDRFSGSGSGTDFTLTISRLEPEDFAVYYCQHYGGSP |
| G4-aa | | RLTFGGGTKVDIK |
| VL | | |
| BCMA_EB | 1615 | MALPVTALLLPLALLLHAARPEVQLVESGGGLVQPGGSLRLSCAASGF |
| B-C1978- | | TFSSYAMSWVRQAPGKGLEWVSAISGSGGSTYYADSVKGRFTISRDNS |
| G4-aa | | KNTLYLQMNSLRAEDTAVYYCAKMGWSSGYLGAFDIWGQGTTVTVSSG |
| Full CART | | GGGSGGGGSGGGGSEIVLTQSPGTLSLSPGERATLSCRASQSVASSFL |
| | | AWYQQKPGQAPRLLIYGASGRATGIPDRFSGSGSGTDFTLTISRLEPE |
| | | DFAVYYCQHYGGSPRLTFGGGTKVDIKTTTPAPRPPTPAPTIASQPLS |
| | | LRPEACRPAAGGAVHTRGLDFACDIYIWAPLAGTCGVLLLSLVITLYC |
| | | KRGRKKLLYIFKQPFMRPVQTTQEEDGCSCRFPEEEEGGCELRVKFSR |
| | | SADAPAYKQGQNQLYNELNLGRREEYDVLDKRRGRDPEMGGKPRRKNP |
| | | QEGLYNELQKDKMAEAYSEIGMKGERRRGKGHDGLYQGLSTATKDTYD |
| | | ALHMQALPPR |
| BCMA_EB | 1616 | ATGGCCCTCCCTGTCACCGCCCTGCTGCTTCCGCTGGCTCTTCTGCTC |
| B-C1978- | | CACGCCGCTCGGCCCGAAGTCCAACTGGTGGAGTCCGGGGGAGGGCTC |
| G4-nt | | GTGCAGCCCGGAGGCAGCCTTCGGCTGTCGTGCGCCGCCTCCGGGTTC |
| Full CART | | ACGTTCTCATCCTACGCGATGTCGTGGGTCAGACAGGCACCAGGAAAG |
| | | GGACTGGAATGGGTGTCCGCCATTAGCGGCTCCGGCGGTAGCACCTAC |
| | | TATGCCGACTCAGTGAAGGGAAGGTTCACTATCTCCCGCGACAACAGC |
| | | AAGAACACCCTGTACCTCCAAATGAACTCTCTGCGGGCCGAGGATACC |
| | | GCGGTGTACTATTGCGCCAAGATGGGTTGGTCCAGCGGATACTTGGGA |
| | | GCCTTCGACATTTGGGGACAGGGCACTACTGTGACCGTGTCCTCCGGG |
| | | GGTGGCGGATCGGGAGGCGGCGGCTCGGGTGGAGGGGGTTCCGAAATC |
| | | GTGTTGACCCAGTCACCGGGAACCCTCTCGCTGTCCCCGGGAGAACGG |
| | | GCTACACTGTCATGTAGAGCGTCCCAGTCCGTGGCTTCCTCGTTCCTG |
| | | GCCTGGTACCAGCAGAAGCCGGGACAGGCACCCCGCCTGCTCATCTAC |
| | | GGAGCCAGCGGCCGGGCGACCGGCATCCCTGACCGCTTCTCCGGTTCC |
| | | GGCTCGGGCACCGACTTTACTCTGACCATTAGCAGGCTTGAGCCCGAG |
| | | GATTTTGCCGTGTACTACTGCCAACACTACGGGGGGAGCCCTCGCCTG |
| | | ACCTTCGGAGGCGGAACTAAGGTCGATATCAAAACCACTACCCCAGCA |
| | | CCGAGGCCACCCACCCCGGCTCCTACCATCGCCTCCCAGCCTCTGTCC |
| | | CTGCGTCCGGAGGCATGTAGACCCGCAGCTGGTGGGGCCGTGCATACC |
| | | CGGGGTCTTGACTTCGCCTGCGATATCTACATTTGGGCCCCTCTGGCT |
| | | GGTACTTGCGGGGTCCTGCTGCTTTCACTCGTGATCACTCTTTACTGT |
| | | AAGCGCGGTCGGAAGAAGCTGCTGTACATCTTTAAGCAACCCTTCATG |
| | | AGGCCTGTGCAGACTACTCAAGAGGAGGACGGCTGTTCATGCCGGTTC |
| | | CCAGAGGAGGAGGAAGGCGGCTGCGAACTGCGCGTGAAATTCAGCCGC |
| | | AGCGCAGATGCTCCAGCCTACAAGCAGGGGCAGAACCAGCTCTACAAC |
| | | GAACTCAATCTTGGTCGGAGAGAGGAGTACGACGTGCTGGACAAGCGG |
| | | AGAGGACGGGACCCAGAAATGGGCGGGAAGCCGCGCAGAAAGAATCCC |
| | | CAAGAGGGCCTGTACAACGAGCTCCAAAAGGATAAGATGGCAGAAGCC |
| | | TATAGCGAGATTGGTATGAAAGGGGAACGCAGAAGAGGCAAAGGCCAC |
| | | GACGGACTGTACCAGGGACTCAGCACCGCCACCAAGGACACCTATGAC |
| | | GCTCTTCACATGCAGGCCCTGCCGCCTCGG |

TABLE 4E
Additional exemplary BCMA CAR sequences

| | | SEQ |
|---|---|---|
| Name | Sequence | ID NO: |
| A7D12.2 | QIQLVQSGPDLKKPGETVKLSCKASGYTFTNFGMNWVKQAPGKGFKWMAWINTYTGES | 1617 |
| VH | YFADDFKGRFAFSVETSATTAYLQINNLKTEDTATYFCARGEIYYGYDGGFAYWGQGT | |
| | LVTVSA | |
| A7D12.2 | DVVMTQSHRFMSTSVGDRVSITCRASQDVNTAVSWYQQKPGQSPKLLIFSASYRYTGV | 1618 |
| VL | PDRFTGSGSGADFTLTISSVQAEDLAVYYCQQHYSTPWTFGGGTKLDIK | |
| A7D12.2 | QIQLVQSGPDLKKPGETVKLSCKASGYTFTNFGMNWVKQAPGKGFKWMAWINTYTGES | 1619 |
| scFv | YFADDFKGRFAFSVETSATTAYLQINNLKTEDTATYFCARGEIYYGYDGGFAYWGQGT | |
| domain | LVTVSAGGGGSGGGGSGGGGSDVVMTQSHRFMSTSVGDRVSITCRASQDVNTAVSWYQ | |
| | QKPGQSPKLLIFSASYRYTGVPDRFTGSGSGADFTLTISSVQAEDLAVYYCQQHYSTP | |
| | WTFGGGTKLDIK | |
| A7D12.2 | QIQLVQSGPDLKKPGETVKLSCKASGYTFTNFGMNWVKQAPGKGFKWMAWINTYTGES | 1620 |
| Full | YFADDFKGRFAFSVETSATTAYLQINNLKTEDTATYFCARGEIYYGYDGGFAYWGQGT | |
| CART | LVTVSAGGGGSGGGGSGGGGSDVVMTQSHRFMSTSVGDRVSITCRASQDVNTAVSWYQ | |
| | QKPGQSPKLLIFSASYRYTGVPDRFTGSGSGADFTLTISSVQAEDLAVYYCQQHYSTP | |
| | WTFGGGTKLDIKTTTPAPRPPTPAPTIASQPLSLRPEACRPAAGGAVHTRGLDFACDI | |
| | YIWAPLAGTCGVLLLSLVITLYCKRGRKKLLYIFKQPFMRPVQTTQEEDGCSCRFPEE | |
| | EEGGCELRVKFSRSADAPAYKQGQNQLYNELNLGRREEYDVLDKRRGRDPEMGGKPRR | |
| | KNPQEGLYNELQKDKMAEAYSEIGMKGERRRGKGHDGLYQGLSTATKDTYDALHMQAL | |
| | PPR | |
| C11D5.3 | QIQLVQSGPELKKPGETVKISCKASGYTFTDYSINWVKRAPGKGLKWMGWINTETREP | 1621 |
| VH | AYAYDFRGRFAFSLETSASTAYLQINNLKYEDTATYFCALDYSYAMDYWGQGTSVTVS | |
| | S | |
| C11D5.3 | DIVLTQSPASLAMSLGKRATISCRASESVSVIGAHLIHWYQQKPGQPPKLLIYLASNL | 1622 |
| VL | ETGVPARFSGSGSGTDFTLTIDPVEEDDVAIYSCLQSRIFPRTFGGGTKLEIK | |
| C11D5.3 | QIQLVQSGPELKKPGETVKISCKASGYTFTDYSINWVKRAPGKGLKWMGWINTETREP | 1623 |
| scFv | AYAYDFRGRFAFSLETSASTAYLQINNLKYEDTATYFCALDYSYAMDYWGQGTSVTVS | |
| domain | SGGGGSGGGGSGGGGSQIQLVQSGPELKKPGETVKISCKASGYTFTDYSINWVKRAPG | |
| | KGLKWMGWINTETREPAYAYDFRGRFAFSLETSASTAYLQINNLKYEDTATYFCALDY | |
| | SYAMDYWGQGTSVTVSS | |
| C11D5.3 | QIQLVQSGPELKKPGETVKISCKASGYTFTDYSINWVKRAPGKGLKWMGWINTETREP | 1624 |
| Full | AYAYDFRGRFAFSLETSASTAYLQINNLKYEDTATYFCALDYSYAMDYWGQGTSVTVS | |
| CART | SGGGGSGGGGSGGGGSQIQLVQSGPELKKPGETVKISCKASGYTFTDYSINWVKRAPG | |
| | KGLKWMGWINTETREPAYAYDFRGRFAFSLETSASTAYLQINNLKYEDTATYFCALDY | |
| | SYAMDYWGQGTSVTVSSTTTPAPRPPTPAPTIASQPLSLRPEACRPAAGGAVHTRGLD | |
| | FACDIYIWAPLAGTCGVLLLSLVITLYCKRGRKKLLYIFKQPFMRPVQTTQEEDGCSC | |
| | RFPEEEEGGCELRVKFSRSADAPAYKQGQNQLYNELNLGRREEYDVLDKRRGRDPEMG | |
| | GKPRRKNPQEGLYNELQKDKMAEAYSEIGMKGERRRGKGHDGLYQGLSTATKDTYDAL | |
| | HMQALPPR | |
| C12A3.2 | QIQLVQSGPELKKPGETVKISCKASGYTFRHYSMNWVKQAPGKGLKWMGRINTESGVP | 1625 |
| VH | IYADDFKGRFAFSVETSASTAYLVINNLKDEDTASYFCSNDYLYSLDFWGQGTALTVS | |
| | S | |
| C12A3.2 | DIVLTQSPPSLAMSLGKRATISCRASESVTILGSHLIYWYQQKPGQPPTLLIQLASNV | 1626 |
| VL | QTGVPARFSGSGSRTDFTLTIDPVEEDDVAVYYCLQSRTIPRTFGGGTKLEIK | |
| C12A3.2 | QIQLVQSGPELKKPGETVKISCKASGYTFRHYSMNWVKQAPGKGLKWMGRINTESGVP | 1627 |
| scFv | IYADDFKGRFAFSVETSASTAYLVINNLKDEDTASYFCSNDYLYSLDFWGQGTALTVS | |
| domain | SGGGGSGGGGSGGGGSDIVLTQSPPSLAMSLGKRATISCRASESVTILGSHLIYWYQQ | |
| | KPGQPPTLLIQLASNVQTGVPARFSGSGSRTDFTLTIDPVEEDDVAVYYCLQSRTIPR | |
| | TFGGGTKLEIK | |
| C12A3.2 | QIQLVQSGPELKKPGETVKISCKASGYTFRHYSMNWVKQAPGKGLKWMGRINTESGVP | 1628 |
| Full | IYADDFKGRFAFSVETSASTAYLVINNLKDEDTASYFCSNDYLYSLDFWGQGTALTVS | |
| CART | SGGGGSGGGGSGGGGSDIVLTQSPPSLAMSLGKRATISCRASESVTILGSHLIYWYQQ | |
| | KPGQPPTLLIQLASNVQTGVPARFSGSGSRTDFTLTIDPVEEDDVAVYYCLQSRTIPR | |
| | TFGGGTKLEIKTTTPAPRPPTPAPTIASQPLSLRPEACRPAAGGAVHTRGLDFACDIY | |
| | IWAPLAGTCGVLLLSLVITLYCKRGRKKLLYIFKQPFMRPVQTTQEEDGCSCRFPEEE | |
| | EGGCELRVKFSRSADAPAYKQGQNQLYNELNLGRREEYDVLDKRRGRDPEMGGKPRRK | |
| | NPQEGLYNELQKDKMAEAYSEIGMKGERRRGKGHDGLYQGLSTATKDTYDALHMQALP | |
| | PR | |
| C13F12.1 | QIQLVQSGPELKKPGETVKISCKASGYTFTHYSMNWVKQAPGKGLKWMGRINTETGEP | 1629 |
| VH | LYADDFKGRFAFSLETSASTAYLVINNLKNEDTATFFCSNDYLYSCDYWGQGTTLTVS | |
| | S | |
| C13F12.1 | DIVLTQSPPSLAMSLGKRATISCRASESVTILGSHLIYWYQQKPGQPPTLLIQLASNV | 1630 |
| VL | QTGVPARFSGSGSRTDFTLTIDPVEEDDVAVYYCLQSRTIPRTFGGGTKLEIK | |
| C13F12.1 | QIQLVQSGPELKKPGETVKISCKASGYTFTHYSMNWVKQAPGKGLKWMGRINTETGEP | 1631 |
| scFv | LYADDFKGRFAFSLETSASTAYLVINNLKNEDTATFFCSNDYLYSCDYWGQGTTLTVS | |
| domain | SGGGGSGGGGSGGGGSDIVLTQSPPSLAMSLGKRATISCRASESVTILGSHLIYWYQQ | |
| | KPGQPPTLLIQLASNVQTGVPARFSGSGSRTDFTLTIDPVEEDDVAVYYCLQSRTIPR | |
| | TFGGGTKLEIK | |
| C13F12.1 | QIQLVQSGPELKKPGETVKISCKASGYTFTHYSMNWVKQAPGKGLKWMGRINTETGEP | 1632 |
| Full | LYADDFKGRFAFSLETSASTAYLVINNLKNEDTATFFCSNDYLYSCDYWGQGTTLTVS | |
| CART | SGGGGSGGGGSGGGGSDIVLTQSPPSLAMSLGKRATISCRASESVTILGSHLIYWYQQ | |
| | KPGQPPTLLIQLASNVQTGVPARFSGSGSRTDFTLTIDPVEEDDVAVYYCLQSRTIPR | |
| | TFGGGTKLEIKTTTPAPRPPTPAPTIASQPLSLRPEACRPAAGGAVHTRGLDFACDIY | |
| | IWAPLAGTCGVLLLSLVITLYCKRGRKKLLYIFKQPFMRPVQTTQEEDGCSCRFPEEE | |
| | EGGCELRVKFSRSADAPAYKQGQNQLYNELNLGRREEYDVLDKRRGRDPEMGGKPRRK | |
| | NPQEGLYNELQKDKMAEAYSEIGMKGERRRGKGHDGLYQGLSTATKDTYDALHMQALP | |
| | PR | |

TABLE 4F
Amino acid sequences of exemplary BCMA binding domains
ER26

| | | |
|---|---|---|
| SEQ ID NO: | J6M0 VH | QVQLVQSGAEVKKPGSSVKVSCKASGGTFSNYWMHWVRQAPGQ |
| 1635 | | GLEWMGATYRGHSDTYYNQKFKGRVTITADKSTSTAYMELSSLRS |
| | | EDTAVYYCARGAIYDGYDVLDNWGQGTLVTVSS |
| SEQ ID NO: | J6M0 VL | DIQMTQSPSSLSASVGDRVTITCSASQDISNYLNWYQQKPGKAPKL |
| 1636 | | LIYYTSNLHSGVPSRFSGSGSGTDFTLTISSLQPEDFATYYCQQYRK |
| | | LPWTFGQGTKLEIKR |
| SEQ ID NO: | Anti-BCMA | QVQLVQSGAEVKKPGSSVKVSCKASGGTFSNYWMHWVRQAPGQ |
| 1637 | heavy chain of | GLEWMGATYRGHSDTYYNQKFKGRVTITADKSTSTAYMELSSLRS |
| | ER26 | EDTAVYYCARGAIYNGYDVLDNWGQGTLVTVSSASTKGPSVFPLA |
| | | PSSKSTSGGTAALGCLVKDYFPEPVTVSWNSGALTSGVHTFPAVLQ |
| | | SSGLYSLSSVVTVPSSSLGTQTYICNVNHKPSNTKVDKRVEPKSCD |
| | | KTHTCPPCPAPELLGGPSVFLFPPKPKDTLMISRTPEVTCVVVAVSH |
| | | EDPEVKFNWYVDGVEVHNAKTKPREEQYNSTYRVVSVLTVLHQD |
| | | WLNGKEYKCKVSNKALAAPIEKTISKAKGQPREPQVCTLPPSREEM |
| | | TKNQVSLSCAVKGFYPSDIAVEWESNGQPENNYKTTPPVLDSDGSF |
| | | FLVSKLTVDKSRWQQGNVFSCSVMHEALHNHYTQKSLSLSPGX, |
| | | wherein X is K or absent |
| SEQ ID NO: | Anti-BCMA | DIQMTQSPSSLSASVGDRVTITCSASQDISNYLNWYQQKPGKAPKL |
| 1638 | light chain of | LIYYTSNLHSGVPSRFSGSGSGTDFTLTISSLQPEDFATYYCQQYRK |
| | ER26 | LPWTFGQGTKLEIKRTVAAPSVFIFPPSDEQLKSGTASVVCLLNNFY |
| | | PREAKVQWKVDNALQSGNSQESVTEQDSKDSTYSLSSTLTLSKAD |
| | | YEKHKVYACEVTHQGLSSPVTKSFNRGEC |

BQ76

| | | |
|---|---|---|
| SEQ ID NO: | 17A5 VH | EVQLLESGGGLVQPGGSLRLSCAASGFTFSSYAMSWVRQAPGKGL |
| 1639 | | EWVSAISGSGGSTYYADSVKGRFTISRDNSKNTLYLQMNSLRAEDT |
| | | AVYYCAKVAPYFAPFDYWGQGTLVTVSS |
| SEQ ID NO: | 17A5 VL | EIVLTQSPGTLSLSPGERATLSCRASQSVSSSYLAWYQQKPGQAPRL |
| 1640 | | LIYGASSRATGIPDRFSGSGSGTDFTLTISRLEPEDFAVYYCQQYGN |
| | | PPLYTFGQGTKVEIK |
| SEQ ID NO: | Anti-BCMA | EVQLLESGGGLVQPGGSLRLSCAASGFTFSSYAMSWVRQAPGKGL |
| 1641 | heavy chain of | EWVSAISGSGGSTYYADSVKGRFTISRDNSKNTLYLQMNSLRAEDT |
| | BQ76 | AVYYCAKVAPYFAPFDYWGQGTLVTVSSASTKGPSVFPLAPSSKST |
| | | SGGTAALGCLVKDYFPEPVTVSWNSGALTSGVHTFPAVLQSSGLY |
| | | SLSSVVTVPSSSLGTQTYICNVNHKPSNTKVDKRVEPKSCDKTHTC |
| | | PPCPAPELLGGPSVFLFPPKPKDTLMISRTPEVTCVVVDVSHEDPEV |
| | | KFNWYVDGVEVHNAKTKPREEQYASTYRVVSVLTVLHQDWLNG |
| | | KEYKCKVSNKALPAPIEKTISKAKGQPREPQVCTLPPSREEMTKNQ |
| | | VSLSCAVKGFYPSDIAVEWESNGQPENNYKTTPPVLDSDGSFFLVS |
| | | KLTVDKSRWQQGNVFSCSVMHEALHNHYTQKSLSLSPGX, wherein |
| | | X is K or absent |
| SEQ ID NO: | Anti-BCMA | EIVLTQSPGTLSLSPGERATLSCRASQSVSSSYLAWYQQKPGQAPRL |
| 1642 | light chain of | LIYGASSRATGIPDRFSGSGSGTDFTLTISRLEPEDFAVYYCQQYGN |
| | BQ76 | PPLYTFGQGTKVEIKRTVAAPSVFIFPPSDEQLKSGTASVVCLLNNF |
| | | YPREAKVQWKVDNALQSGNSQESVTEQDSKDSTYSLSSTLTLSKA |
| | | DYEKHKVYACEVTHQGLSSPVTKSFNRGEC |

BU76

| | | |
|---|---|---|
| SEQ ID NO: | C11D5 VH | QIQLVQSGPELKKPGETVKISCKASGYTFTDYSINWVKRAPGKGLK |
| 1643 | | WMGWINTETREPAYAYDFRGRFAFSLETSASTAYLQINNLKYEDT |
| | | ATYFCALDYSYAMDYWGQGTSVTVSS |
| SEQ ID NO: | C11D5 VL | DIVLTQSPPSLAMSLGKRATISCRASESVTILGSHLIHWYQQKPGQP |
| 1644 | | PTLLIQLASNVQTGVPARFSGSGSRTDFTLTIDPVEEDDVAVYYCLQ |
| | | SRTIPRTFGGGTKLEIK |
| SEQ ID NO: | Anti-BCMA | QIQLVQSGPELKKPGETVKISCKASGYTFTDYSINWVKRAPGKGLK |
| 1645 | heavy chain of | WMGWINTETREPAYAYDFRGRFAFSLETSASTAYLQINNLKYEDT |
| | BU76 | ATYFCALDYSYAMDYWGQGTSVTVSSASTKGPSVFPLAPSSKSTS |
| | | GGTAALGCLVKDYFPEPVTVSWNSGALTSGVHTFPAVLQSSGLYS |
| | | LSSVVTVPSSSLGTQTYICNVNHKPSNTKVDKRVEPKSCDKTHTCP |
| | | PCPAPELLGGPSVFLFPPKPKDTLMISRTPEVTCVVVDVSHEDPEVK |
| | | FNWYVDGVEVHNAKTKPREEQYASTYRVVSVLTVLHQDWLNGK |
| | | EYKCKVSNKALPAPIEKTISKAKGQPREPQVCTLPPSREEMTKNQV |
| | | SLSCAVKGFYPSDIAVEWESNGQPENNYKTTPPVLDSDGSFFLVSK |
| | | LTVDKSRWQQGNVFSCSVMHEALHNHYTQKSLSLSPGX, wherein |
| | | X is K or absent |
| SEQ ID NO: | Anti-BCMA | DIVLTQSPASLAMSLGKRATISCRASESVSVIGAHLIHWYQQKPGQP |
| 1646 | light chain of | PKLLIYLASNLETGVPARFSGSGSGTDFTLTIDPVEEDDVAIYSCLQS |
| | BU76 | RIFPRTFGGGTKLEIKRTVAAPSVFIFPPSDEQLKSGTASVVCLLNNF |
| | | YPREAKVQWKVDNALQSGNSQESVTEQDSKDSTYSLSSTLTLSKA |
| | | DYEKHKVYACEVTHQGLSSPVTKSFNRGEC |

EE11

| | | |
|---|---|---|
| SEQ ID NO: | 83A10 VH | EVQLLESGGGLVQPGGSLRLSCAASGFTFSSYAMSWVRQAPGKGL |
| 1647 | | EWVSAISGSGGSTYYADSVKGRFTISRDNSKNTLYLQMNSLRAEDT |
| | | AVYYCAKVLGWFDYWGQGTLVTVSS |
| SEQ ID NO: | 83A10 VL | EIVLTQSPGTLSLSPGERATLSCRASQSVSSSYLAWYQQKPGQAPRL |
| 1648 | | LIYGASSRATGIPDRFSGSGSGTDFTLTISRLEPEDFAVYYCQQYGY |
| | | PPDFTFGQGTKVEIK |
| SEQ ID NO: | Anti-BCMA | EVQLLESGGGLVQPGGSLRLSCAASGFTFSSYAMSWVRQAPGKGL |
| 1649 | scFv-Fc of | EWVSAISGSGGSTYYADSVKGRFTISRDNSKNTLYLQMNSLRAEDT |
| | EE11 | AVYYCAKVLGWFDYWGQGTLVTVSSGGGGSGGGGSGGGGSGGG |
| | | GSEIVLTQSPGTLSLSPGERATLSCRASQSVSSSYLAWYQQKPGQAP |
| | | RLLIYGASSRATGIPDRFSGSGSGTDFTLTISRLEPEDFAVYYCQQY |
| | | GYPPDFTFGQGTKVEIKGGGGSDKTHTCPPCPAPELLGGPSVFLFPP |
| | | KPKDTLMISRTPEVTCVVVAVSHEDPEVKFNWYVDGVEVHNAKT |
| | | KPREEQYNSTYRVVSVLTVLHQDWLNGKEYKCKVSNKALAAPIEK |
| | | TISKAKGQPREPQVYTLPPCRDELTKNQVSLWCLVKGFYPSDIAVE |
| | | WESNGQPENNYKTTPPVLDSDGSFFLYSKLTVDKSRWQQGNVFSC |
| | | SVMHEALHNHYTQKSLSLSPGX, wherein X is K or absent |

EM90

| | | |
|---|---|---|
| SEQ ID NO: | Comment light | QAVVTQEPSLTVSPGGTVTLTCGSSTGAVTTSNYANWVQEKPGQA |
| 1650 | chain of EM90 | FRGLIGGTNKRAPGTPARFSGSLLGGKAALTLSGAQPEDEAEYYCA |
| | | LWYSNLWVFGGGTKLTVLGQPKAAPSVTLFPPSSEELQANKATLV |
| | | CLISDFYPGAVTVAWKADSSPVKAGVETTTPSKQSNNKYAASSYLS |
| | | LTPEQWKSHRSYSCQVTHEGSTVEKTVAPTECS |
| SEQ ID NO: | Anti-BCMA | EVQLVESGGGLVKPGGSLRLSCAASGFTFSNSGMIWVRQAPGKGL |
| 1651 | heavy chain of | EWVGHIRSKTDGGTTDYAAPVKGRFTISRDDSKNTLYLQMNSLKT |
| | EM90 | EDTAVYYCTTGGSGSFDYWGQGTLVTVSSASTKGPSVFPLAPSSKS |
| | | TSGGTAALGCLVKDYFPEPVTVSWNSGALTSGVHTFPAVLQSSGL |
| | | YSLSSVVTVPSSSLGTQTYICNVNHKPSNTKVDKRVEPKSCDKTHT |
| | | CPPCPAPEAAGGPSVFLFPPKPKDTLMISRTPEVTCVVVDVSHEDPE |
| | | VKFNWYVDGVEVHNAKTKPREEQYNSTYRVVSVLTVLHQDWLN |
| | | GKEYKCKVSNKALPAPIEKTISKAKGQPREPQVCTLPPSREEMTKN |
| | | QVSLSCAVKGFYPSDIAVEWESNGQPENNYKTTPPVLDSDGSFFLV |
| | | SKLTVDKSRWQQGNVFSCSVMHEALHNHYTQKSLSLSPGX, |
| | | wherein X is K or absent |

TABLE 4G
Heavy Chain Variable Domain CDRs according to the Kabat numbering scheme
(Kabat et al. (1991), ″Sequences of Proteins of Immunological Interest,″ 5th Ed.
Public Health Service, National Institutes of Health, Bethesda, MD)

| Candidate | HCDR1 | ID | HCDR2 | ID | HCDR3 | ID |
|---|---|---|---|---|---|---|
| 139109 | NHGMS | 1652 | GIVYSGSTYYAASV | 1701 | HGGESDV | 1741 |
| | | | KG | | | |
| 139103 | NYAMS | 1653 | GISRSGENTYYADS | 1702 | SPAHYYGGMDV | 1742 |
| | | | VKG | | | |
| 139105 | DYAMH | 1654 | GISWNSGSIGYADSV | 1703 | HSFLAY | 1743 |
| | | | KG | | | |
| 139111 | NHGMS | 1655 | GIVYSGSTYYAASV | 1704 | HGGESDV | 1744 |
| | | | KG | | | |
| 139100 | NFGIN | 1656 | WINPKNNNTNYAQ | 1705 | GPYYYQSYMDV | 1745 |
| | | | KFQG | | | |
| 139101 | SDAMT | 1657 | VISGSGGTTYYADS | 1706 | LDSSGYYYARGPRY | 1746 |
| | | | VKG | | | |
| 139102 | NYGIT | 1658 | WISAYNGNTNYAQ | 1707 | GPYYYYMDV | 1747 |
| | | | KFQG | | | |
| 139104 | NHGMS | 1659 | GIVYSGSTYYAASV | 1708 | HGGESDV | 1748 |
| | | | KG | | | |
| 139106 | NHGMS | 1670 | GIVYSGSTYYAASV | 1709 | HGGESDV | 1749 |
| | | | KG | | | |
| 139107 | NHGMS | 1671 | GIVYSGSTYYAASV | 1710 | HGGESDV | 1750 |
| | | | KG | | | |
| 139108 | DYYMS | 1672 | YISSSGSTIYYADSV | 1711 | ESGDGMDV | 1751 |
| | | | KG | | | |
| 139110 | DYYMS | 1672 | YISSSGNTIYYADSV | 1712 | STMVREDY | 1752 |
| | | | KG | | | |
| 139112 | NHGMS | 1673 | GIVYSGSTYYAASV | 1713 | HGGESDV | 1753 |
| | | | KG | | | |
| 139113 | NHGMS | 1674 | GIVYSGSTYYAASV | 1714 | HGGESDV | 1754 |
| | | | KG | | | |
| 139114 | NHGMS | 1675 | GIVYSGSTYYAASV | 1715 | HGGESDV | 1755 |
| | | | KG | | | |
| 149362 | SSYYYW | 1676 | SIYYSGSAYYNPSLK | 1716 | HWQEWPDAFDI | 1756 |
| | G | | S | | | |
| 149363 | TSGMCV | 1677 | RIDWDEDKFYSTSL | 1717 | SGAGGTSATAFDI | 1757 |
| | S | | KT | | | |
| 149364 | SYSMN | 1678 | SISSSSSYIYYADSVK | 1718 | TIAAVYAFDI | 1758 |
| | | | G | | | |
| 149365 | DYYMS | 1679 | YISSSGSTIYYADSV | 1719 | DLRGAFDI | 1759 |
| | | | KG | | | |
| 149366 | SHYIH | 1680 | MINPSGGVTAYSQT | 1720 | EGSGSGWYFDF | 1760 |
| | | | LQG | | | |
| 149367 | SGGYY | 1681 | YIYYSGSTYYNPSLK | 1721 | AGIAARLRGAFDI | 1761 |
| | WS | | S | | | |
| 149368 | SYAIS | 1682 | GIIPIFGTANYAQKF | 1722 | RGGYQLLRWDVGLL | 1762 |
| | | | QG | | RSAFDI | |
| 149369 | SNSAAW | 1683 | RTYYRSKWYSFYAI | 1723 | SSPEGLFLYWFDP | 1763 |
| | N | | SLKS | | | |
| BCMA_EBB- | SYAMS | 1684 | AISGSGGSTYYADS | 1724 | VEGSGSLDY | 1764 |
| C1978-A4 | | | VKG | | | |
| BCMA_EBB- | RYPMS | 1685 | GISDSGVSTYYADS | 1725 | RAGSEASDI | 1765 |
| C1978-G1 | | | AKG | | | |
| BCMA_EBB- | SYAMS | 1686 | AISGSGGSTYYADS | 1726 | ATYKRELRYYYGM | 1766 |
| C1979-C1 | VKG | | DV | | | |
| BCMA_EBB- | SYAMS | 1687 | AISGSGGSTYYADS | 1727 | ATYKRELRYYYGM | 1767 |
| C1978-C7 | | | VKG | | DV | |
| BCMA_EBB- | DYAMH | 1688 | GISWNSGSIGYADSV | 1728 | VGKAVPDV | 1768 |
| C1978-D10 | | | KG | | | |
| BCMA_EBB- | DYAMH | 1689 | SINWKGNSLAYGDS | 1729 | HQGVAYYNYAMDV | 1769 |
| C1979-C12 | | | VKG | | | |
| BCMA_EBB- | SYAMS | 1690 | AISGSGGSTYYADS | 1730 | VVRDGMDV | 1770 |
| C1980-G4 | | | VKG | | | |
| BCMA_EBB- | SYAMS | 1691 | AISGSGGSTYYADS | 1731 | IPQTGTFDY | 1771 |
| C1980-D2 | | | VKG | | | |
| BCMA_EBB- | SYAMS | 1692 | AISGSGGSTYYADS | 1732 | ANYKRELRYYYGM | 1772 |
| C1978-A10 | | | VKG | | DV | |
| BCMA_EBB- | SYAMS | 1693 | AISGSGGSTYYADS | 1733 | ALVGATGAFDI | 1773 |
| C1978-D4 | | | VKG | | | |
| BCMA_EBB- | SYAMS | 1694 | AISGSGGSTYYADS | 1734 | WFGEGFDP | 1774 |
| C1980-A2 | | | VKG | | | |
| BCMA_EBB- | SYAMS | 1695 | AISGSGGSTYYADS | 1735 | VGYDSSGYYRDYYG | 1775 |
| C1981-C3 | | | VKG | | MDV | |
| BCMA_EBB- | SYAMS | 1696 | AISGSGGSTYYADS | 1736 | MGWSSGYLGAFDI | 1776 |
| C1978-G4 | | | VKG | | | |
| A7D12.2 | NFGMN | 1697 | WINTYTGESYFADD | 1737 | GEIYYGYDGGFAY | 1777 |
| | | | FKG | | | |
| C11D5.3 | DYSIN | 1698 | WINTETREPAYAYD | 1738 | DYSYAMDY | 1778 |
| | | | FRG | | | |
| C12A3.2 | HYSMN | 1699 | RINTESGVPIYADDF | 1739 | DYLYSLDF | 1779 |
| | | | KG | | | |
| C13F12.1 | HYSMN | 1700 | RINTETGEPLYADDF | 1740 | DYLYSCDY | 1800 |
| | | | KG | | | |

TABLE 4H
Light Chain Variable Domain CDRs according to the Kabat numbering scheme
(Kabat et al. (1991), ″Sequences of Proteins of Immunological Interest,″ 5th Ed.
Public Health Service, National Institutes of Health, Bethesda, MD).

| Candidate | LCDR1 | ID | LCDR2 | ID | LCDR3 | ID |
|---|---|---|---|---|---|---|
| 139109 | RASQSISSYLN | 2514 | AASSLQS | 2554 | QQSYSTPYT | 2594 |
| 139103 | RASQSISSSFLA | 2504 | GASRRAT | 2544 | QQYHSSPSWT | 2584 |
| 139105 | RSSQSLLHSNGYN | 2505 | LGSNRAS | 2545 | mQALQTPYT | 2585 |
| | YLD | | | | | |
| 139111 | KSSQSLLRNDGKTP | 2506 | EVSNRFS | 2546 | MQNIQFPS | 2586 |
| | LY | | | | | |
| 139100 | RSSQSLLHSNGYN | 2507 | LGSKRAS | 2547 | MQALQTPYT | 2587 |
| | YLN | | | | | |
| 139101 | RASQSISSYLN | 2508 | GASTLAS | 2548 | QQSYKRAS | 2588 |
| 139102 | RSSQSLLYSNGYN | 2509 | LGSNRAS | 2549 | MQGRQFPYS | 2589 |
| | YVD | | | | | |
| 139104 | RASQSVSSNLA | 2510 | GASTRAS | 2550 | QQYGSSLT | 2590 |
| 139106 | RASQSVSSKLA | 2511 | GASIRAT | 2551 | QQYGSSSWT | 2591 |
| 139107 | RASQSVGSTNLA | 2512 | DASNRAT | 2552 | QQYGSSPPWT | 2592 |
| 139108 | RASQSISSYLN | 2513 | AASSLQS | 2553 | QQSYTLA | 2593 |
| 139110 | KSSESLVHNSGKTY | 2515 | EVSNRDS | 2555 | MQGTHWPGT | 2595 |
| | LN | | | | | |
| 139112 | QASEDINKFLN | 2516 | DASTLQT | 2556 | QQYESLPLT | 2596 |
| 139113 | RASQSVGSNLA | 2517 | GASTRAT | 2557 | QQYNDWLPV | 2597 |
| | | | | | T | |
| 139114 | RASQSIGSSSLA | 2518 | GASSRAS | 2558 | QQYAGSPPFT | 2598 |
| 149362 | KASQDIDDAMN | 2519 | SATSPVP | 2559 | LQHDNFPLT | 2599 |
| 149363 | RASQDIYNNLA | 2520 | AANKSQS | 2560 | QHYYRFPYS | 2600 |
| 149364 | RSSQSLLHSNGYN | 2521 | LGSNRAS | 2561 | MQALQTPYT | 2601 |
| | YLD | | | | | |
| 149365 | GGNNIGTKSVH | 2522 | DDSVRPS | 2562 | QVWDSDSEH | 2602 |
| | | | | | VV | |
| 149366 | SGDGLSKKYVS | 2523 | RDKERPS | 2563 | QAWDDTTVV | 2603 |
| 149367 | RASQGIRNWLA | 2524 | AASNLQS | 2564 | QKYNSAPFT | 2604 |
| 149368 | GGNNIGSKSVH | 2525 | GKNNRPS | 2565 | SSRDSSGDHL | 2605 |
| | | | | | RV | |
| 149369 | QGDSLGNYYAT | 2526 | GTNNRPS | 2566 | NSRDSSGHHL | 2606 |
| | | | | | L | |
| BCMA_EBB- | RASQSVSSAYLA | 2527 | GASTRAT | 2567 | QHYGSSFNGS | 2607 |
| C1978-A4 | | | | | SLFT | |
| BCMA_EBB- | RASQSVSNSLA | 2528 | DASSRAT | 2568 | QQFGTSSGLT | 2608 |
| C1978-G1 | | | | | | |
| BCMA_EBB- | RASQSVSSSFLA | 2529 | GASSRAT | 2569 | QQYHSSPSWT | 2609 |
| C1979-C1 | | | | | | |
| BCMA_EBB- | RASQSVSTTFLA | 2530 | GSSNRAT | 2570 | QQYHSSPSWT | 2610 |
| C1978-C7 | | | | | | |
| BCMA_EBB- | RASQSISSYLN | 2531 | AASSLQS | 2571 | QQSYSTPYS | 2611 |
| C1978-D10 | | | | | | |
| BCMA_EBB- | RATQSIGSSFLA | 2532 | GASQRAT | 2572 | QHYESSPSWT | 2612 |
| C1979-C12 | | | | | | |
| BCMA_EBB- | RASQSVSSSYLA | 2533 | GASSRAT | 2573 | QQYGSPPRFT | 2613 |
| C1980-G4 | | | | | | |
| BCMA_EBB- | RASQSVSSSYLA | 2534 | GASSRAT | 2574 | QHYGSSPSWT | 2614 |
| C1980-D2 | | | | | | |
| BCMA_EBB- | RASQRVASNYLA | 2535 | GASSRAT | 2575 | QHYDSSPSWT | 2615 |
| C1978-A10 | | | | | | |
| BCMA_EBB- | RASQSLSSNFLA | 2536 | GASNWAT | 2576 | QYYGTSPMY | 2616 |
| C1978-D4 | | | | | T | |
| BCMA_EBB- | RSSQSLLHSNGYN | 2537 | LGSNRAS | 2577 | MQALQTPLT | 2617 |
| C1980-A2 | YLD | | | | | |
| BCMA_EBB- | RASQSVSSSYLA | 2538 | GTSSRAT | 2578 | QHYGNSPPKF | 2618 |
| C1981-C3 | | | | | T | |
| BCMA_EBB- | RASQSVASSFLA | 2539 | GASGRAT | 2579 | QHYGGSPRLT | 2619 |
| C1978-G4 | | | | | | |
| A7D12.2 | RASQDVNTAVS | 2540 | SASYRYT | 2580 | QQHYSTPWT | 2620 |
| C11D5.3 | RASESVSVIGAHLI | 2541 | LASNLET | 2581 | LQSRIFPRT | 2621 |
| | H | | | | | |
| C12A3.2 | RASESVTILGSHLIY | 2542 | LASNVQT | 2582 | LQSRTIPRT | 2622 |
| C13F12.1 | RASESVTILGSHLIY | 2543 | LASNVQT | 2583 | LQSRTIPRT | 2623 |

TABLE 4I
Heavy Chain Variable Domain CDRs according to a combination of the Kabat numbering
scheme (Kabat et al. (1991), ″Sequences of Proteins of Immunological Interest,″ 5th
Ed. Public Health Service, National Institutes of Health, Bethesda, MD) and the Chothia
numbering scheme (A1-Lazikani et al., (1997) JMB 273,927-948).

| Candidate | HCDR1 | ID | HCDR2 | ID | HCDR3 | ID |
|---|---|---|---|---|---|---|
| 139109 | GFALSNHGMS | 2874 | GIVYSGSTYYAAS | 2914 | HGGESDV | 2954 |
| | | | VKG | | | |
| 139103 | GFTFSNYAMS | 2864 | GISRSGENTYYAD | 2904 | SPAHYYGGMDV | 2944 |
| | | | SVKG | | | |
| 139105 | GFTFDDYAMH | 2865 | GISWNSGSIGYAD | 2905 | HSFLAY | 2945 |
| | | | SVKG | | | |
| 139111 | GFALSNHGMS | 2866 | GIVYSGSTYYAAS | 2906 | HGGESDV | 2946 |
| | | | VKG | | | |
| 139100 | GYIFDNFGIN | 2867 | WINPKNNNTNYA | 2907 | GPYYYQSYMDV | 2947 |
| | | | QKFQG | | | |
| 139101 | GFTFSSDAMT | 2868 | VISGSGGTTYYAD | 2908 | LDSSGYYYARGPR | 2948 |
| | | | SVKG | | Y | |
| 139102 | GYTFSNYGIT | 2869 | WISAYNGNTNYA | 2909 | GPYYYYMDV | 2949 |
| | | | QKFQG | | | |
| 139104 | GFALSNHGMS | 2870 | GIVYSGSTYYAAS | 2910 | HGGESDV | 2950 |
| | | | VKG | | | |
| 139106 | GFALSNHGMS | 2871 | GIVYSGSTYYAAS | 2911 | HGGESDV | 2951 |
| | | | VKG | | | |
| 139107 | GFALSNHGMS | 2872 | GIVYSGSTYYAAS | 2912 | HGGESDV | 2952 |
| | | | VKG | | | |
| 139108 | GFTFSDYYMS | 2873 | YISSSGSTIYYADS | 2913 | ESGDGMDV | 2953 |
| | | | VKG | | | |
| 139110 | GFTFSDYYMS | 2875 | YISSSGNTIYYAD | 2915 | STMVREDY | 2955 |
| | | | SVKG | | | |
| 139112 | GFALSNHGMS | 2876 | GIVYSGSTYYAAS | 2916 | HGGESDV | 2956 |
| | | | VKG | | | |
| 139113 | GFALSNHGMS | 2877 | GIVYSGSTYYAAS | 2917 | HGGESDV | 2957 |
| | | | VKG | | | |
| 139114 | GFALSNHGMS | 2878 | GIVYSGSTYYAAS | 2918 | HGGESDV | 2958 |
| | | | VKG | | | |
| 149362 | GGSISSSYYYW | 2879 | SIYYSGSAYYNPS | 2919 | HWQEWPDAFDI | 2959 |
| | G | | LKS | | | |
| 149363 | GFSLRTSGMC | 2880 | RIDWDEDKFYSTS | 2920 | SGAGGTSATAFDI | 2960 |
| | VS | | LKT | | | |
| 149364 | GFTFSSYSMN | 2881 | SISSSSSYIYYADS | 2921 | TIAAVYAFDI | 2961 |
| | | | VKG | | | |
| 149365 | GFTFSDYYMS | 2882 | YISSSGSTIYYADS | 2922 | DLRGAFDI | 2962 |
| | | | VKG | | | |
| 149366 | GYTVTSHYIH | 2883 | MINPSGGVTAYS | 2923 | EGSGSGWYFDF | 2963 |
| | | | QTLQG | | | |
| 149367 | GGSISSGGYY | 2884 | YIYYSGSTYYNPS | 2924 | AGIAARLRGAFDI | 2964 |
| | WS | | LKS | | | |
| 149368 | GGTFSSYAIS | 2885 | GIIPIFGTANYAQ | 2925 | RGGYQLLRWDVG | 2965 |
| | | | KFQG | | LLRSAFDI | |
| 149369 | GDSVSSNSAA | 2886 | RTYYRSKWYSFY | 2926 | SSPEGLFLYWFDP | 2966 |
| | WN | | AISLKS | | | |
| BCMA_EBB- | GFTFSSYAMS | 2887 | AISGSGGSTYYAD | 2927 | VEGSGSLDY | 2967 |
| C1978-A4 | | | SVKG | | | |
| BCMA_EBB- | GITFSRYPMS | 2888 | GISDSGVSTYYAD | 2928 | RAGSEASDI | 2968 |
| C1978-G1 | | | SAKG | | | |
| BCMA_EBB- | GFTFSSYAMS | 2889 | AISGSGGSTYYAD | 2929 | ATYKRELRYYYG | 2969 |
| C1979-C1 | | | SVKG | | MDV | |
| BCMA_EBB- | GFTFSSYAMS | 2890 | AISGSGGSTYYAD | 2930 | ATYKRELRYYYG | 2970 |
| C1978-C7 | | | SVKG | | MDV | |
| BCMA_EBB- | GFTFDDYAMH | 2891 | GISWNSGSIGYAD | 2931 | VGKAVPDV | 2971 |
| C1978-D10 | | | SVKG | | | |
| BCMA_EBB- | GFTFDDYAMH | 2892 | SINWKGNSLAYG | 2932 | HQGVAYYNYAM | 2972 |
| C1979-C12 | | | DSVKG | | DV | |
| BCMA_EBB- | GFTFSSYAMS | 2893 | AISGSGGSTYYAD | 2933 | VVRDGMDV | 2973 |
| C1980-G4 | | | SVKG | | | |
| BCMA_EBB- | GFTFSSYAMS | 2894 | AISGSGGSTYYAD | 2934 | IPQTGTFDY | 2974 |
| C1980-D2 | | | SVKG | | | |
| BCMA_EBB- | GFTFSSYAMS | 2895 | AISGSGGSTYYAD | 2935 | ANYKRELRYYYG | 2975 |
| C1978-A10 | | | SVKG | | MDV | |
| BCMA_EBB- | GFSFSSYAMS | 2896 | AISGSGGSTYYAD | 2936 | ALVGATGAFDI | 2976 |
| C1978-D4 | | | SVKG | | | |
| BCMA_EBB- | GFTFSSYAMS | 2897 | AISGSGGSTYYAD | 2937 | WFGEGFDP | 2977 |
| C1980-A2 | | | SVKG | | | |
| BCMA_EBB- | GFTFSSYAMS | 2898 | AISGSGGSTYYAD | 2938 | VGYDSSGYYRDY | 2978 |
| C1981-C3 | | | SVKG | | YGMDV | |
| BCMA_EBB- | GFTFSSYAMS | 2899 | AISGSGGSTYYAD | 2939 | MGWSSGYLGAFD | 2979 |
| C1978-G4 | | | SVKG | | I | |
| A7D12.2 | GYTFTNFGMN | 2900 | WINTYTGESYFA | 2940 | GEIYYGYDGGFAY | 2980 |
| | | | DDFKG | | | |
| C11D5.3 | GYTFTDYSIN | 2901 | WINTETREPAYA | 2941 | DYSYAMDY | 2981 |
| | | | YDFRG | | | |
| C12A3.2 | GYTFRHYSMN | 2902 | RINTESGVPIYAD | 2942 | DYLYSLDF | 2982 |
| | | | DFKG | | | |
| C13F12.1 | GYTFTHYSMN | 2903 | RINTETGEPLYAD | 2943 | DYLYSCDY | 2983 |
| | | | DFKG | | | |

TABLE 4J
Light Chain Variable Domain CDRs according to a combination of the Kabat
numbering scheme (Kabat et al. (1991), ″Sequences of Proteins of Immunological
Interest,″ 5th Ed. Public Health Service, National Institutes of Health,
Bethesda, MD) and the Chothia numbering scheme (A1-Lazikani et al., (1997)
JMB 273,927-948).

| Candidate | LCDR1 | ID | LCDR2 | ID | LCDR3 | ID |
|---|---|---|---|---|---|---|
| 139109 | RASQSISSYLN | 3994 | AASSLQS | 1034 | QQSYSTPYT | 3074 |
| 139103 | RASQSISSSFLA | 3984 | GASRRAT | 3024 | QQYHSSPSWT | 3064 |
| 139105 | RSSQSLLHSNGYNYLD | 3985 | LGSNRAS | 3025 | MQALQTPYT | 3065 |
| 139111 | KSSQSLLRNDGKTPLY | 3986 | EVSNRFS | 3026 | MQNIQFPS | 3066 |
| 139100 | RSSQSLLHSNGYNYLN | 3987 | LGSKRAS | 3027 | MQALQTPYT | 3067 |
| 139101 | RASQSISSYLN | 3988 | GASTLAS | 3028 | QQSYKRAS | 3068 |
| 139102 | RSSQSLLYSNGYNYVD | 3989 | LGSNRAS | 3029 | MQGRQFPYS | 3069 |
| 139104 | RASQSVSSNLA | 3990 | GASTRAS | 3030 | QQYGSSLT | 3070 |
| 139106 | RASQSVSSKLA | 3991 | GASIRAT | 3031 | QQYGSSSWT | 3071 |
| 139107 | RASQSVGSTNLA | 3992 | DASNRAT | 3032 | QQYGSSPPWT | 3072 |
| 139108 | RASQSISSYLN | 3993 | AASSLQS | 3033 | QQSYTLA | 3073 |
| 139110 | KSSESLVHNSGKTYLN | 3995 | EVSNRDS | 3035 | MQGTHWPGT | 3075 |
| 139112 | QASEDINKFLN | 3996 | DASTLQT | 3036 | QQYESLPLT | 3076 |
| 139113 | RASQSVGSNLA | 3997 | GASTRAT | 3037 | QQYNDWLPV | 3077 |
| | | | | | T | |
| 139114 | RASQSIGSSSLA | 3998 | GASSRAS | 3038 | QQYAGSPPFT | 3078 |
| 149362 | KASQDIDDAMN | 3999 | SATSPVP | 3039 | LQHDNFPLT | 3079 |
| 149363 | RASQDIYNNLA | 3000 | AANKSQS | 3040 | QHYYRFPYS | 3080 |
| 149364 | RSSQSLLHSNGYNYLD | 3001 | LGSNRAS | 3041 | MQALQTPYT | 3081 |
| 149365 | GGNNIGTKSVH | 3002 | DDSVRPS | 3042 | QVWDSDSEHV | 3082 |
| | | | | | V | |
| 149366 | SGDGLSKKYVS | 3003 | RDKERPS | 3043 | QAWDDTTVV | 3083 |
| 149367 | RASQGIRNWLA | 3004 | AASNLQS | 3044 | QKYNSAPFT | 3084 |
| 149368 | GGNNIGSKSVH | 3005 | GKNNRPS | 3045 | SSRDSSGDHL | 3085 |
| | | | | | RV | |
| 149369 | QGDSLGNYYAT | 3006 | GTNNRPS | 3046 | NSRDSSGHHL | 3086 |
| | | | | | L | |
| BCMA_EBB- | RASQSVSSAYLA | 3007 | GASTRAT | 3047 | QHYGSSFNGS | 3087 |
| C1978-A4 | | | | | SLFT | |
| BCMA_EBB- | RASQSVSNSLA | 3008 | DASSRAT | 3048 | QQFGTSSGLT | 3088 |
| C1978-G1 | | | | | | |
| BCMA_EBB- | RASQSVSSSFLA | 3009 | GASSRAT | 3049 | QQYHSSPSWT | 3089 |
| C1979-C1 | | | | | | |
| BCMA_EBB- | RASQSVSTTFLA | 3010 | GSSNRAT | 3050 | QQYHSSPSWT | 3090 |
| C1978-C7 | | | | | | |
| BCMA_EBB- | RASQSISSYLN | 3011 | AASSLQS | 3051 | QQSYSTPYS | 3091 |
| C1978-D10 | | | | | | |
| BCMA_EBB- | RATQSIGSSFLA | 3012 | GASQRAT | 3052 | QHYESSPSWT | 3092 |
| C1979-C12 | | | | | | |
| BCMA_EBB- | RASQSVSSSYLA | 3013 | GASSRAT | 3053 | QQYGSPPRFT | 3093 |
| C1980-G4 | | | | | | |
| BCMA_EBB- | RASQSVSSSYLA | 3014 | GASSRAT | 3054 | QHYGSSPSWT | 3094 |
| C1980-D2 | | | | | | |
| BCMA_EBB- | RASQRVASNYLA | 3015 | GASSRAT | 3055 | QHYDSSPSWT | 3095 |
| C1978-A10 | | | | | | |
| BCMA_EBB- | RASQSLSSNFLA | 3016 | GASNWAT | 3056 | QYYGTSPMYT | 3096 |
| C1978-D4 | | | | | | |
| BCMA_EBB- | RSSQSLLHSNGYNYLD | 3017 | LGSNRAS | 3057 | MQALQTPLT | 3097 |
| C1980-A2 | | | | | | |
| BCMA_EBB- | RASQSVSSSYLA | 3018 | GTSSRAT | 3058 | QHYGNSPPKF | 3098 |
| C1981-C3 | | | | | T | |
| BCMA_EBB- | RASQSVASSFLA | 3019 | GASGRAT | 3059 | QHYGGSPRLT | 3099 |
| C1978-G4 | | | | | | |
| A7D12.2 | RASQDVNTAVS | 3020 | SASYRYT | 3060 | QQHYSTPWT | 3100 |
| C11D5.3 | RASESVSVIGAHLIH | 3021 | LASNLET | 3061 | LQSRIFPRT | 3101 |
| C12A3.2 | RASESVTILGSHLIY | 3022 | LASNVQT | 3062 | LQSRTIPRT | 3102 |
| C13F12.1 | RASESVTILGSHLIY | 3023 | LASNVQT | 3063 | LQSRTIPRT | 3103 |

### Combination CARs

[0581] In some embodiments, the method comprises administering a Chimeric Antigen Receptor (CAR) molecule that binds CD19 in combination with a B-cell inhibitor, for example, one or more (e.g., one, two, three or more) B-cell inhibitors. In some embodiments, the B-cell inhibitor is chosen from an inhibitor of CD10, CD19, CD20, CD22, CD34, CD123, FLT-3, or ROR1, or a combination thereof. In some embodiments, the combination maintains or has better clinical effectiveness as compared to either therapy alone. In some embodiments, the methods herein involve the use of engineered cells, e.g., T cells, to express a CAR molecule that binds CD19, in combination with a B-cell inhibitor (e.g., an antibody (e.g., a mono- or bispecific antibody) to a second B target, e.g., CD10, CD19, CD20, CD22, CD34, CD123, FLT-3, or ROR1) or a CAR-expressing cell e.g., a CAR-expressing immune effector cell, that binds to the second B cell target, or a combination thereof) to treat the disorder associated with expression of CD19. The disclosure additionally features novel antigen binding domains and CAR molecules directed to CD20 and CD22, and uses, e.g., as monotherapies or in combination therapies.

[0582] Accordingly, in one aspect, the invention pertains to a method of treating a subject (e.g., a mammal) having a disease associated with expression of CD19. The method comprises administering to the subject a CD19 inhibitor, e.g., a CAR molecule that binds CD19 described herein, in combination with a B-cell inhibitor. For instance, the method comprises administering to the subject an effective number of one or more cells that express a CAR molecule that binds CD19, e.g., a CAR molecule that binds CD19 described herein (e.g., a wild-type or mutant CD19), in combination with a B-cell inhibitor. In certain embodiments, the B-cell inhibitor is chosen from a CD10 inhibitor, e.g., one or more CD10 inhibitors described herein; a CD20 inhibitor, e.g., one or more CD20 inhibitor described herein; a CD22 inhibitor, e.g., one or more CD22 inhibitors described herein; a CD34 inhibitor, e.g., one or more CD34 inhibitors described herein; a CD123 inhibitor, e.g., one or more CD123 inhibitor described herein; a FLT-3 inhibitor, e.g., one or more FLT-3 inhibitors described herein; an ROR1 inhibitor, e.g., one or more ROR1 inhibitor described herein; a CD79b inhibitor, e.g., one or more CD79b inhibitor described herein; a CD179b inhibitor, e.g., one or more CD179b inhibitor described herein; a CD79a inhibitor, e.g., one or more CD79a inhibitor described herein or any combination thereof. In certain aspects, a method of treating a subject having a B-cell leukemia or B-cell lymphoma, comprising administering to the subject an effective number of one or more cells that express a CAR molecule that binds CD19, in combination with one or more inhibitors of CD10, CD20, CD22, CD34, CD123, FLT-3, ROR1, CD79b, CD179b, or CD79a is disclosed.

[0583] In a related aspect, the present disclosure provides a method of reducing the proliferation of CD19-expressing cells, e.g., by administering to a subject, e.g., a patient in need thereof, a combination therapy as described herein, e.g., a CD19 inhibitor in combination with a B-cell inhibitor, e.g., one or more B-cell inhibitors as described herein. In another aspect, the present disclosure provides a method of selectively killing CD19-expressing cells, e.g., by administering to a subject, e.g., a patient in need thereof, a combination therapy as described herein, e.g., a CD19 inhibitor in combination with a B-cell inhibitor, e.g., one or more B-cell inhibitors as described herein. In certain aspects, the disclosure provides a method of providing an anti-tumor immunity in a subject, e.g., a mammal, comprising administering to the mammal an effective amount of a combination (e.g., one or more CAR-expressing cells) as described herein.

[0584] In an aspect, the disclosure provides a method of preventing a CD19-negative relapse in a mammal, comprising administering to the mammal one or more B-cell inhibitors, wherein the B-cell inhibitor comprises an inhibitor of one or more of CD10, CD20, CD22, CD34, CD123, FLT-3, ROR1, CD79b, CD179b, or CD79a.

### CD20 Inhibitors and Binding Domains

[0585] CD20 inhibitors and binding domains, exemplary CD20 inhibitors, and methods of using the same are described e.g., on pages 126-136 of International Application WO 2016/164731, filed Apr. 8, 2016, which is incorporated by reference in its entirety.

[0586] In one aspect the antigen-binding portion of the CAR recognizes and binds an antigen within the extracellular domain of the CD20 protein. In one aspect, the CD20 protein is expressed on a cancer cell. In some aspects, the present disclosure provides a CD20 inhibitor or binding domain, e.g., a CD20 inhibitor or binding domain as described herein. The composition may also comprise a second agent, e.g., an anti-CD19 CAR-expressing cell or a CD19 binding domain.

[0587] In one embodiment, the CD20 inhibitor is an anti-CD20 expressing cell, e.g., CD20 CART or CD20-expressing NK cell.

[0588] Design, function, and sequences of CD20 CAR-expressing cells, e.g., CD20 CARTs, and methods of using the same are described on pages 127-136 of International Application WO 2016/164731, filed Apr. 8, 2016, which is incorporated by reference in its entirety. CD20 binding domains are described in Tables 11-15B on pages 422-454 of International Application WO 2016/164731.

### CD22 Inhibitors and Binding Domains

[0589] CD22 inhibitors and binding domains, exemplary CD22 inhibitors, and methods of using the same are described e.g., on pages 136-146 of International Application WO 2016/164731, filed Apr. 8, 2016, which is incorporated by reference in its entirety.

[0590] In one aspect the antigen-binding portion of the CAR recognizes and binds an antigen within the extracellular domain of the CD22 protein. In one aspect, the CD22 protein is expressed on a cancer cell. In some aspects, the present disclosure provides a CD22 inhibitor or binding domain, e.g., a CD22 inhibitor or binding domain as described herein. The composition may also comprise a second agent, e.g., an anti-CD19 CAR-expressing cell or a CD19 binding domain.

[0591] In some aspects, a CD22 inhibitor or binding domain is administered as a monotherapy. In some aspects, the CD22 inhibitor or binding domain is administered in combination with a second agent such as an anti-CD19 CAR-expressing cell. In an embodiment, the CD22 inhibitor is administered in combination with a CD19 inhibitor, e.g., a CD19 CAR-expressing cell, e.g., a CAR-expressing cell described herein e.g., a cell expressing a CAR comprising an antibody binding domain that is murine, human, or humanized.

[0592] In one embodiment, the CD22 inhibitor is a CD22 CAR-expressing cell, e.g., a CD22-CAR that comprises a CD22 binding domain and is engineered into a cell (e.g., T cell or NK cell) for administration in combination with CD19 CAR-expressing cell, e.g., CART, and methods of their use for adoptive therapy.

[0593] Design, function, and sequences of CD22 CAR-expressing cells, e.g., CD22 CARTs, and methods of using the same are described on pages 137-143 of International Application WO 2016/164731, filed Apr. 8, 2016, which is incorporated by reference in its entirety.

[0594] In one embodiment, the CD22 inhibitor is a CD22 inhibitor described herein. The CD22 inhibitor can be, e.g., an anti-CD22 antibody (e.g., an anti-CD22 mono- or bispecific antibody), a small molecule, or a CD22 CART. In some embodiments the anti-CD22 antibody is conjugated or otherwise bound to a therapeutic agent. Exemplary therapeutic agents include, e.g., microtubule disrupting agents (e.g., monomethyl auristatin E) and toxins (e.g., diphtheria toxin or Pseudomonas exotoxin-A, ricin). In an embodiment, the CD22 inhibitor is administered in combination with a CD19 inhibitor, e.g., a CD19 CAR-expressing cell, e.g., a CAR-expressing cell described herein e.g., a cell expressing a CAR comprising an antibody binding domain that is murine, human, or humanized.

[0595] In one embodiment, the anti-CD22 antibody is selected from an anti-CD19/CD22 bispecific ligand-directed toxin (e.g., two scFv ligands, recognizing human CD19 and CD22, linked to the first 389 amino acids of diphtheria toxin (DT), DT 390, e.g., DT2219ARL); anti-CD22 monoclonal antibody-MMAE conjugate (e.g., DCDT2980S); scFv of an anti-CD22 antibody RF134 fused to a fragment of Pseudomonas exotoxin-A (e.g., BL22); deglycosylated ricin A chain-conjugated anti-CD19/anti-CD22 (e.g., Combotox); humanized anti-CD22 monoclonal antibody (e.g., epratuzumab); or the Fv portion of an anti-CD22 antibody covalently fused to a 38 KDa fragment of Pseudomonas exotoxin-A (e.g., moxetumomab pasudotox).

[0596] CD22 inhibitor dosing is described on pages 144-146 of International Application WO 2016/164731, filed Apr. 8, 2016, which is incorporated by reference in its entirety.

[0597] CDRs of a CD22 antibody molecule are described in Table 7A, 7B, 7C, 8A and/or 8B on pages 406-414 of International Application WO 2016/164731, filed Apr. 8, 2016, which is incorporated by reference in its entirety.

### CD123 Inhibitors

[0598] CD123 inhibitors and binding domains, exemplary CD123 inhibitors, and methods of using the same are described e.g., on pages 53-56, and 149-151 of International Application WO 2016/164731, filed Apr. 8, 2016, which is incorporated by reference in its entirety.

[0599] In one aspect the antigen-binding portion of the CAR recognizes and binds an antigen within the extracellular domain of the CD123 protein. In one aspect, the CD123 protein is expressed on a cancer cell. In an embodiment, the CD123 inhibitor is administered in combination with a CD19 inhibitor, e.g., a CD19 CAR-expressing cell, e.g., a CAR-expressing cell described herein, e.g., a cell expressing a CAR comprising an antibody binding domain that is murine, human, or humanized.

[0600] Design, function, and sequences of CD123 CAR-expressing cells, e.g., CD123 CARTs, and methods of using the same are described on line 10-24 on page 151 of International Application WO 2016/164731, filed Apr. 8, 2016, which is incorporated by reference in its entirety.

[0601] In some embodiments, a CD123 inhibitor includes an anti-CD123 CAR-expressing cell, e.g., CART, e.g., a cell expressing an anti-CD123 CAR construct or encoded by a CD123 binding CAR comprising a scFv, CDRs, or VH and VL chains. In another aspect, provided herein is a population of CAR-expressing cells, e.g., CART cells, comprising a mixture of cells expressing CD19 CARs and CD123 CARs.

### Other Inhibitors

[0602] ROR1 inhibitors, anti-ROR1 CAR-expressing cells, and methods of using the same are described on pages 51-53, and 146-149 of International Application WO 2016/164731, filed Apr. 8, 2016, which is incorporated by reference in its entirety.

[0603] CD10 inhibitors, anti-CD10 CAR-expressing cells, and methods of using the same are described on pages 56-57, and 151-154 of International Application WO 2016/164731, filed Apr. 8, 2016, which is incorporated by reference in its entirety.

[0604] CD34 inhibitors, anti-CD34 CAR-expressing cells, and methods of using the same are described on page 57, and 154-156 of International Application WO 2016/164731, filed Apr. 8, 2016, which is incorporated by reference in its entirety.

[0605] FLT3 inhibitors, anti-FLT3 CAR-expressing cells, and methods of using the same are described on page 57, and 156-161 of International Application WO 2016/164731, filed Apr. 8, 2016, which is incorporated by reference in its entirety.

[0606] CD79b inhibitors, anti-CD79b CAR-expressing cells, and methods of using the same are described on page 58, and 161-163 of International Application WO 2016/164731, filed Apr. 8, 2016, which is incorporated by reference in its entirety.

[0607] CD179b inhibitors, anti-CD179b CAR-expressing cells, and methods of using the same are described on page 58, and 163-165 of International Application WO 2016/164731, filed Apr. 8, 2016, which is incorporated by reference in its entirety.

[0608] CD79a inhibitors, anti-CD79a CAR-expressing cells, and methods of using the same are described on page 59, and 165-166 of International Application WO 2016/164731, filed Apr. 8, 2016, which is incorporated by reference in its entirety.

[0609] In an embodiment, the B-cell inhibitor comprises an inhibitor of one or more of CD10, CD19, CD20, CD22, CD34, FLT-3, or ROR1. In an embodiment, the B-cell inhibitor comprises an effective number of one or more cells that express a CAR molecule that binds one or more of CD10, CD20, CD22, CD34, FLT-3, ROR1, CD79b, CD179b, or CD79a. In an embodiment, the B-cell inhibitor comprises a CD123 CAR. In an embodiment, the B cell inhibitor comprises one or more cells that express a CAR molecule that binds CD123. In an embodiment, the disease is a CD19-negative cancer, e.g., a CD19-negative relapsed cancer. In an embodiment, the CD19 CAR-expressing cell is administered simultaneously with, before, or after the one or more B-cell inhibitor.

[0610] In some aspects, the disclosure provides a method of treating a patient who is a non-responder, partial responder, or relapser to a CD19 inhibitor, e.g., a CD19 CAR therapy, comprising administering to the patient a B-cell inhibitor, e.g., a B-cell inhibitor as described herein, e.g., an inhibitor of one or more of (e.g., 2, 3, 4, 5, 6, 7, 8, 9, or all of) CD10, CD20, CD22, CD34, CD123, FLT-3, ROR1, CD79b, CD179b, or CD79a. In embodiments, the B-cell inhibitor is a CAR-expressing cell (e.g., T cell or NK cell) that is an inhibitor of one or more of (e.g., 2, 3, 4, 5, 6, or all of) CD10, CD20, CD22, CD34, CD123, FLT-3, or ROR1. In embodiments, the patient has, or is identified as having, a CD19-negative cancer cell and a cancer cell that is positive for one or more of (e.g., 2, 3, 4, 5, 6, 7, 8, 9, or all of) CD10, CD20, CD22, CD34, CD123, FLT-3, ROR1, CD79b, CD179b, or CD79a.

[0611] In embodiments, the method further comprises administering to the patient a B-cell inhibitor for which the cancer cell is positive, e.g., an inhibitor of one or more of (e.g., 2, 3, 4, 5, 6, 7, 8, 9, or all of) the CD10, CD20, CD22, CD34, CD123, FLT-3, ROR1, CD79b, CD179b, or CD79a for which the cancer cell is positive. In embodiments, the method further comprises one or both of a step of determining whether the patient comprises a CD19-negative cancer cell, and a step of determining whether the patient comprises a cancer cell that is positive for one or more of (e.g., 2, 3, 4, 5, 6, 7, 8, 9, or all of) CD10, CD20, CD22, CD34, CD123, FLT-3, ROR1, CD79b, CD179b, or CD79a. In embodiments, the subject has or is identified as having a population of tumor or cancer cells that test negative for CD19 expression as measured by binding to an anti-CD19 antibody, e.g., an antibody with the same specificity as any of the CAR molecules in Table 2 or Table 3.

### CAR Therapies

[0612] CAR antigen binding domains, nucleic acid constructs comprising CAR molecules, functional features thereof, and CAR-expressing cells are described in International Application WO 2016/164731, filed Apr. 8, 2016, which is incorporated by reference in its entirety.

[0613] The inhibitors herein, e.g., CAR-expressing cells directed against CD10, CD20, CD22, CD34, CD123, FLT-3, ROR1, CD79b, CD179b, or CD79a, may comprise one or more of the compositions described herein, e.g., a transmembrane domain, intracellular signaling domain, costimulatory domain, leader sequence, or hinge.

[0614] In one aspect, the present invention encompasses a recombinant nucleic acid construct comprising a transgene encoding a CAR. In some embodiments, the nucleic acid molecule comprises a nucleic acid sequence encoding an anti-CD19 binding domain selected from one or more of SEQ ID NOS:61-72, wherein the sequence is contiguous with and in the same reading frame as the nucleic acid sequence encoding an intracellular signaling domain. An exemplary intracellular signaling domain that can be used in the CAR includes, but is not limited to, one or more intracellular signaling domains of, e.g., CD3-zeta, CD28, 4-1BB, and the like. In some instances, the CAR can comprise any combination of CD3-zeta, CD28, 4-1BB, and the like.

[0615] In one aspect, the present invention contemplates modifications of the starting antibody or fragment (e.g., scFv) amino acid sequence that generate functionally equivalent molecules. For example, the VH or VL of an antigen binding domain, e.g., scFv, comprised in the CAR can be modified to retain at least about 70%, 71%. 72%. 73%, 74%, 75%, 76%, 77%, 78%, 79%, 80%, 81%, 82%, 83%, 84%, 85%, 86%, 87%, 88%, 89%, 90%, 91%, 92%, 93%, 94%, 95%, 96%, 97%, 98%, 99% identity of the starting VH or VL framework region of the antigen binding domain, e.g., scFv. The present invention contemplates modifications of the entire CAR construct, e.g., modifications in one or more amino acid sequences of the various domains of the CAR construct in order to generate functionally equivalent molecules. The CAR construct can be modified to retain at least about 70%, 71%. 72%. 73%, 74%, 75%, 76%, 77%, 78%, 79%, 80%, 81%, 82%, 83%, 84%, 85%, 86%, 87%, 88%, 89%, 90%, 91%, 92%, 93%, 94%, 95%, 96%, 97%, 98%, 99% identity of the starting CAR construct. The present invention also contemplates modifications of CDRs, e.g., modifications in one or more amino acid sequences of one or more CDRs of a CAR construct in order to generate functionally equivalent molecules. For instance, the CDR may have, e.g., up to and including 1, 2, 3, 4, 5, or 6 alterations (e.g., substitutions) relative to a CDR sequence provided herein.

[0616] The nucleic acid sequences coding for the desired molecules can be obtained using recombinant methods known in the art, such as, for example by screening libraries from cells expressing the gene, by deriving the gene from a vector known to include the same, or by isolating directly from cells and tissues containing the same, using standard techniques. Alternatively, the nucleic acid of interest can be produced synthetically, rather than cloned.

[0617] The present invention includes, among other things, retroviral and lentiviral vector constructs expressing a CAR that can be directly transduced into a cell.

[0618] The present invention also includes an RNA construct that can be directly transfected into a cell. A method for generating mRNA for use in transfection involves in vitro transcription (IVT) of a template with specially designed primers, followed by polyA addition, to produce a construct containing 3′ and 5′ untranslated sequence (“UTR”), a 5′ cap and/or Internal Ribosome Entry Site (IRES), the nucleic acid to be expressed, and a polyA tail, typically 50-2000 bases in length (SEQ ID NO:118). RNA so produced can efficiently transfect different kinds of cells. In one embodiment, the template includes sequences for the CAR. In an embodiment, an RNA CAR vector is transduced into a T cell by electroporation.

### Antigen Binding Domain

[0619] In one aspect, the CAR of the invention comprises a target-specific binding element otherwise referred to as an antigen binding domain. The choice of moiety depends upon the type and number of ligands that define the surface of a target cell. For example, the antigen binding domain may be chosen to recognize a ligand that acts as a cell surface marker on target cells associated with a particular disease state. Thus examples of cell surface markers that may act as ligands for the antigen binding domain in a CAR of the invention include those associated with viral, bacterial and parasitic infections, autoimmune disease and cancer cells. The antigen-binding domain can bind, e.g., one or more of CD19 or BCMA.

[0620] In one aspect, the CAR-mediated T-cell response can be directed to an antigen of interest by way of engineering an antigen binding domain that specifically binds a desired antigen into the CAR.

[0621] The antigen binding domain (e.g., an antigen-binding domain that binds one or more of CD19 or BCMA) can be any domain that binds to the antigen including but not limited to a monoclonal antibody, a polyclonal antibody, a recombinant antibody, a murine antibody, a human antibody, a humanized antibody, and a functional fragment thereof, including but not limited to a single-domain antibody such as a heavy chain variable domain (VH), a light chain variable domain (VL) and a variable domain (VHH) of camelid derived nanobody, and to an alternative scaffold known in the art to function as antigen binding domain, such as a recombinant fibronectin domain, and the like.

[0622] In some instances, it is beneficial for the antigen binding domain to be derived from the same species in which the CAR will ultimately be used in. For example, for use in humans, it may be beneficial for the antigen binding domain of the CAR to comprise human or humanized residues for the antigen binding domain of an antibody or antibody fragment.

[0623] A humanized antibody can be produced using a variety of techniques known in the art, including but not limited to, CDR-grafting (see, e.g., European Patent No. EP 239,400; International Publication No. WO 91/09967; and U.S. Pat. Nos. 5,225,539, 5,530,101, and 5,585,089, each of which is incorporated herein in its entirety by reference), veneering or resurfacing (see, e.g., European Patent Nos. EP 592,106 and EP 519,596; Padlan, 1991, Molecular Immunology, 28(4/5):489-498; Studnicka et al., 1994, Protein Engineering, 7(6):805-814; and Roguska et al., 1994, PNAS, 91:969-973, each of which is incorporated herein by its entirety by reference), chain shuffling (see, e.g., U.S. Pat. No. 5,565,332, which is incorporated herein in its entirety by reference), and techniques disclosed in, e.g., U.S. Patent Application Publication No. US2005/0042664, U.S. Patent Application Publication No. US2005/0048617, U.S. Pat. Nos. 6,407,213, 5,766,886, International Publication No. WO 9317105, Tan et al., J. Immunol., 169:1119-25 (2002), Caldas et al., Protein Eng., 13(5):353-60 (2000), Morea et al., Methods, 20(3):267-79 (2000), Baca et al., J. Biol. Chem., 272(16):10678-84 (1997), Roguska et al., Protein Eng., 9(10):895-904 (1996), Couto et al., Cancer Res., 55 (23 Supp):5973s-5977s (1995), Couto et al., Cancer Res., 55(8):1717-22 (1995), Sandhu J S, Gene, 150(2):409-10 (1994), and Pedersen et al., J. Mol. Biol., 235(3):959-73 (1994), each of which is incorporated herein in its entirety by reference.

[0624] A humanized antibody or antibody fragment has one or more amino acid residues remaining in it from a source which is nonhuman. These nonhuman amino acid residues are often referred to as “import” residues, which are typically taken from an “import” variable domain. As provided herein, humanized antibodies or antibody fragments comprise one or more CDRs from nonhuman immunoglobulin molecules and framework regions wherein the amino acid residues comprising the framework are derived completely or mostly from human germline. Multiple techniques for humanization of antibodies or antibody fragments are well-known in the art and can essentially be performed following the method of Winter and co-workers (Jones et al., Nature, 321:522-525 (1986); Riechmann et al., Nature, 332:323-327 (1988); Verhoeyen et al., Science, 239:1534-1536 (1988)), by substituting rodent CDRs or CDR sequences for the corresponding sequences of a human antibody, i.e., CDR-grafting (EP 239,400; PCT Publication No. WO 91/09967; and U.S. Pat. Nos. 4,816,567; 6,331,415; 5,225,539; 5,530,101; 5,585,089; 6,548,640, the contents of which are incorporated herein by reference herein in their entirety). In such humanized antibodies and antibody fragments, substantially less than an intact human variable domain has been substituted by the corresponding sequence from a nonhuman species. Humanized antibodies are often human antibodies in which some CDR residues and possibly some framework (FR) residues are substituted by residues from analogous sites in rodent antibodies. Humanization of antibodies and antibody fragments can also be achieved by veneering or resurfacing (EP 592,106; EP 519,596; Padlan, 1991, Molecular Immunology, 28(4/5):489-498; Studnicka et al., Protein Engineering, 7(6):805-814 (1994); and Roguska et al., PNAS, 91:969-973 (1994)) or chain shuffling (U.S. Pat. No. 5,565,332), the contents of which are incorporated herein by reference herein in their entirety.

[0625] The choice of human variable domains, both light and heavy, to be used in making the humanized antibodies is to reduce antigenicity. According to the so-called “best-fit” method, the sequence of the variable domain of a rodent antibody is screened against the entire library of known human variable-domain sequences. The human sequence which is closest to that of the rodent is then accepted as the human framework (FR) for the humanized antibody (Sims et al., J. Immunol., 151:2296 (1993); Chothia et al., J. Mol. Biol., 196:901 (1987), the contents of which are incorporated herein by reference herein in their entirety). Another method uses a particular framework derived from the consensus sequence of all human antibodies of a particular subgroup of light or heavy chains. The same framework may be used for several different humanized antibodies (see, e.g., Nicholson et al. Mol. Immun. 34 (16-17): 1157-1165 (1997); Carter et al., Proc. Natl. Acad. Sci. USA, 89:4285 (1992); Presta et al., J. Immunol., 151:2623 (1993), the contents of which are incorporated herein by reference herein in their entirety). In some embodiments, the framework region, e.g., all four framework regions, of the heavy chain variable region are derived from a VH4_4-59 germline sequence. In one embodiment, the framework region can comprise, one, two, three, four or five modifications, e.g., substitutions, e.g., from the amino acid at the corresponding murine sequence (e.g., of SEQ ID NO:59). In one embodiment, the framework region, e.g., all four framework regions of the light chain variable region are derived from a VK3_1.25 germline sequence. In one embodiment, the framework region can comprise, one, two, three, four or five modifications, e.g., substitutions, e.g., from the amino acid at the corresponding murine sequence (e.g., of SEQ ID NO:59).

[0626] In some aspects, the portion of a CAR composition of the invention that comprises an antibody fragment is humanized with retention of high affinity for the target antigen and other favorable biological properties. According to one aspect of the invention, humanized antibodies and antibody fragments are prepared by a process of analysis of the parental sequences and various conceptual humanized products using three-dimensional models of the parental and humanized sequences. Three-dimensional immunoglobulin models are commonly available and are familiar to those skilled in the art. Computer programs are available which illustrate and display probable three-dimensional conformational structures of selected candidate immunoglobulin sequences. Inspection of these displays permits analysis of the likely role of the residues in the functioning of the candidate immunoglobulin sequence, e.g., the analysis of residues that influence the ability of the candidate immunoglobulin to bind the target antigen. In this way, FR residues can be selected and combined from the recipient and import sequences so that the desired antibody or antibody fragment characteristic, such as increased affinity for the target antigen, is achieved. In general, the CDR residues are directly and most substantially involved in influencing antigen binding.

[0627] A humanized antibody or antibody fragment may retain a similar antigenic specificity as the original antibody, e.g., in the present invention, the ability to bind human CD19, CD20, or CD22. In some embodiments, a humanized antibody or antibody fragment may have improved affinity and/or specificity of binding to human CD19, CD20, or CD22.

[0628] In one aspect, the binding domain (e.g., an antigen-binding domain that binds one or more of CD10, CD19, CD20, CD22, CD34, CD123, FLT-3, ROR1, CD79b, CD179b, CD79a, or BCMA) is a fragment, e.g., a single chain variable fragment (scFv). In one aspect, the binding domain is a Fv, a Fab, a (Fab′)2, or a bi-functional (e.g. bi-specific) hybrid antibody (e.g., Lanzavecchia et al., Eur. J. Immunol. 17, 105 (1987)). In one aspect, the antibodies and fragments thereof of the invention binds a CD19, CD20, or CD22 protein with wild-type or enhanced affinity.

[0629] In some instances, scFvs can be prepared according to method known in the art (see, for example, Bird et al., (1988) Science 242:423-426 and Huston et al., (1988) Proc. Natl. Acad. Sci. USA 85:5879-5883). ScFv molecules can be produced by linking VH and VL regions together using flexible polypeptide linkers. The scFv molecules comprise a linker (e.g., a Ser-Gly linker) with an optimized length and/or amino acid composition. The linker length can greatly affect how the variable regions of a scFv fold and interact. In fact, if a short polypeptide linker is employed (e.g., between 5-10 amino acids) intrachain folding is prevented. Interchain folding is also required to bring the two variable regions together to form a functional epitope binding site. For examples of linker orientation and size see, e.g., Hollinger et al. 1993 Proc Natl Acad. Sci. U.S.A. 90:6444-6448, U.S. Patent Application Publication Nos. 2005/0100543, 2005/0175606, 2007/0014794, and PCT publication Nos. WO2006/020258 and WO2007/024715, is incorporated herein by reference.

[0630] An scFv can comprise a linker of at least 1, 2, 3, 4, 5, 6, 7, 8, 9, 10, 11, 12, 13, 14, 15, 16, 17, 18, 19, 20, 25, 30, 35, 40, 45, 50, or more amino acid residues between its VL and VH regions. The linker sequence may comprise any naturally occurring amino acid. In some embodiments, the linker sequence comprises amino acids glycine and serine. In another embodiment, the linker sequence comprises sets of glycine and serine repeats such as (Gly₄Ser)n, where n is a positive integer equal to or greater than 1 (SEQ ID NO:18). In one embodiment, the linker can be (Gly₄Ser)₄ (SEQ ID NO:106) or (Gly₄Ser)₃(SEQ ID NO:107). Variation in the linker length may retain or enhance activity, giving rise to superior efficacy in activity studies.

[0631] In some embodiments, the amino acid sequence of the antigen binding domain (e.g., an antigen-binding domain that binds one or more of CD10, CD19, CD20, CD22, CD34, CD123, FLT-3, ROR1, CD79b, CD179b, or CD79a) or other portions or the entire CAR) can be modified, e.g., an amino acid sequence described herein can be modified, e.g., by a conservative substitution. Families of amino acid residues having similar side chains have been defined in the art, including basic side chains (e.g., lysine, arginine, histidine), acidic side chains (e.g., aspartic acid, glutamic acid), uncharged polar side chains (e.g., glycine, asparagine, glutamine, serine, threonine, tyrosine, cysteine), nonpolar side chains (e.g., alanine, valine, leucine, isoleucine, proline, phenylalanine, methionine, tryptophan), beta-branched side chains (e.g., threonine, valine, isoleucine) and aromatic side chains (e.g., tyrosine, phenylalanine, tryptophan, histidine).

[0632] Percent identity in the context of two or more nucleic acids or polypeptide sequences, refers to two or more sequences that are the same. Two sequences are “substantially identical” if two sequences have a specified percentage of amino acid residues or nucleotides that are the same (e.g., 60% identity, optionally 70%, 71%. 72%. 73%, 74%, 75%, 76%, 77%, 78%, 79%, 80%, 81%, 82%, 83%, 84%, 85%, 86%, 87%, 88%, 89%, 90%, 91%, 92%, 93%, 94%, 95%, 96%, 97%, 98%, 99% identity over a specified region, or, when not specified, over the entire sequence), when compared and aligned for maximum correspondence over a comparison window, or designated region as measured using one of the following sequence comparison algorithms or by manual alignment and visual inspection. Optionally, the identity exists over a region that is at least about 50 nucleotides (or 10 amino acids) in length, or over a region that is 100 to 500 or 1000 or more nucleotides (or 20, 50, 200 or more amino acids) in length.

[0633] For sequence comparison, typically one sequence acts as a reference sequence, to which test sequences are compared. When using a sequence comparison algorithm, test and reference sequences are entered into a computer, subsequence coordinates are designated, if necessary, and sequence algorithm program parameters are designated. Default program parameters can be used, or alternative parameters can be designated. The sequence comparison algorithm then calculates the percent sequence identities for the test sequences relative to the reference sequence, based on the program parameters. Methods of alignment of sequences for comparison are well known in the art. Optimal alignment of sequences for comparison can be conducted, e.g., by the local homology algorithm of Smith and Waterman, (1970) Adv. Appl. Math. 2:482c, by the homology alignment algorithm of Needleman and Wunsch, (1970) J. Mol. Biol. 48:443, by the search for similarity method of Pearson and Lipman, (1988) Proc. Nat'l. Acad. Sci. USA 85:2444, by computerized implementations of these algorithms (GAP, BESTFIT, FASTA, and TFASTA in the Wisconsin Genetics Software Package, Genetics Computer Group, 575 Science Dr., Madison, Wis.), or by manual alignment and visual inspection (see, e.g., Brent et al., (2003) Current Protocols in Molecular Biology).

[0634] Two examples of algorithms that are suitable for determining percent sequence identity and sequence similarity are the BLAST and BLAST 2.0 algorithms, which are described in Altschul et al., (1977) Nuc. Acids Res. 25:3389-3402; and Altschul et al., (1990) J. Mol. Biol. 215:403-410, respectively. Software for performing BLAST analyses is publicly available through the National Center for Biotechnology Information.

[0635] The percent identity between two amino acid sequences can also be determined using the algorithm of E. Meyers and W. Miller, (1988) Comput. Appl. Biosci. 4:11-17) which has been incorporated into the ALIGN program (version 2.0), using a PAM120 weight residue table, a gap length penalty of 12 and a gap penalty of 4. In addition, the percent identity between two amino acid sequences can be determined using the Needleman and Wunsch (1970) J. Mol. Biol. 48:444-453) algorithm which has been incorporated into the GAP program in the GCG software package (available at www.gcg.com), using either a Blossom 62 matrix or a PAM250 matrix, and a gap weight of 16, 14, 12, 10, 8, 6, or 4 and a length weight of 1, 2, 3, 4, 5, or 6.

[0636] In one aspect, the present invention contemplates modifications of the starting antibody or fragment (e.g., scFv) amino acid sequence that generate functionally equivalent molecules. For example, the VH or VL of a binding domain (e.g., an antigen-binding domain that binds one or more of CD10, CD19, CD20, CD22, CD34, CD123, FLT-3, ROR1, CD79b, CD179b, or CD79a), e.g., scFv, comprised in the CAR can be modified to retain at least about 70%, 71%. 72%. 73%, 74%, 75%, 76%, 77%, 78%, 79%, 80%, 81%, 82%, 83%, 84%, 85%, 86%, 87%, 88%, 89%, 90%, 91%, 92%, 93%, 94%, 95%, 96%, 97%, 98%, 99% identity of the starting VH or VL framework region of the anti-CD19 binding domain, e.g., scFv. More broadly, the VH or VL of a B-cell antigen binding domain, to CD10, CD20, CD22, CD34, CD123, FLT-3, or ROR1, e.g., scFv, comprised in the CAR can be modified to retain at least about 70%, 71%. 72%. 73%, 74%, 75%, 76%, 77%, 78%, 79%, 80%, 81%, 82%, 83%, 84%, 85%, 86%, 87%, 88%, 89%, 90%, 91%, 92%, 93%, 94%, 95%, 96%, 97%, 98%, 99% identity of the starting VH or VL framework region of the antigen binding domain, e.g., scFv. The present invention contemplates modifications of the entire CAR construct, e.g., modifications in one or more amino acid sequences of the various domains of the CAR construct in order to generate functionally equivalent molecules. The CAR construct can be modified to retain at least about 70%, 71%. 72%. 73%, 74%, 75%, 76%, 77%, 78%, 79%, 80%, 81%, 82%, 83%, 84%, 85%, 86%, 87%, 88%, 89%, 90%, 91%, 92%, 93%, 94%, 95%, 96%, 97%, 98%, 99% identity of the starting CAR construct.

### Bispecific CARs

[0637] In an embodiment a multispecific antibody molecule is a bispecific antibody molecule. A bispecific antibody has specificity for no more than two antigens. A bispecific antibody molecule is characterized by a first immunoglobulin variable domain sequence which has binding specificity for a first epitope and a second immunoglobulin variable domain sequence that has binding specificity for a second epitope. In an embodiment the first and second epitopes are on the same antigen, e.g., the same protein (or subunit of a multimeric protein). In an embodiment the first and second epitopes overlap. In an embodiment the first and second epitopes do not overlap. In an embodiment the first and second epitopes are on different antigens, e.g., different proteins (or different subunits of a multimeric protein). In an embodiment a bispecific antibody molecule comprises a heavy chain variable domain sequence and a light chain variable domain sequence which have binding specificity for a first epitope and a heavy chain variable domain sequence and a light chain variable domain sequence which have binding specificity for a second epitope. In an embodiment a bispecific antibody molecule comprises a half antibody having binding specificity for a first epitope and a half antibody having binding specificity for a second epitope. In an embodiment a bispecific antibody molecule comprises a half antibody, or fragment thereof, having binding specificity for a first epitope and a half antibody, or fragment thereof, having binding specificity for a second epitope. In an embodiment a bispecific antibody molecule comprises a scFv, or fragment thereof, have binding specificity for a first epitope and a scFv, or fragment thereof, have binding specificity for a second epitope. In an embodiment the first epitope is located on CD19 and the second epitope is located on a second B cell antigen, e.g., CD10, CD20, CD22, CD34, CD123, FLT-3, or ROR1.

[0638] A bispecific antibody molecule (which can be, e.g., administered alone or as a portion of a CAR) can comprise two VH regions and two VL regions. In some embodiments, the upstream antibody or portion thereof (e.g. scFv) is arranged with its VH (VH₁) upstream of its VL (VL₁) and the downstream antibody or portion thereof (e.g. scFv) is arranged with its VL (VL₂) upstream of its VH (VH₂), such that the overall bispecific antibody molecule has the arrangement VH₁-VL₁-VL₂-VH₂. In other embodiments, the upstream antibody or portion thereof (e.g. scFv) is arranged with its VL (VL₁) upstream of its VH (VH₁) and the downstream antibody or portion thereof (e.g. scFv) is arranged with its VH (VH₂) upstream of its VL (VL₂), such that the overall bispecific antibody molecule has the arrangement VL₁-VH₁-VH₂-VL₂.

[0639] In certain embodiments, the antibody molecule is a multi-specific (e.g., a bispecific or a trispecific) antibody molecule. Protocols for generating bispecific or heterodimeric antibody molecules are known in the art; including but not limited to, for example, the “knob in a hole” approach described in, e.g., U.S. Pat. No. 5,731,168; the electrostatic steering Fc pairing as described in, e.g., WO 09/089004, WO 06/106905 and WO 2010/129304; Strand Exchange Engineered Domains (SEED) heterodimer formation as described in, e.g., WO 07/110205; Fab arm exchange as described in, e.g., WO 08/119353, WO 2011/131746, and WO 2013/060867; double antibody conjugate, e.g., by antibody cross-linking to generate a bi-specific structure using a heterobifunctional reagent having an amine-reactive group and a sulfhydryl reactive group as described in, e.g., U.S. Pat. No. 4,433,059; bispecific antibody determinants generated by recombining half antibodies (heavy-light chain pairs or Fabs) from different antibodies through cycle of reduction and oxidation of disulfide bonds between the two heavy chains, as described in, e.g., U.S. Pat. No. 4,444,878; trifunctional antibodies, e.g., three Fab′ fragments cross-linked through sulfhdryl reactive groups, as described in, e.g., U.S. Pat. No. 5,273,743; biosynthetic binding proteins, e.g., pair of scFvs cross-linked through C-terminal tails preferably through disulfide or amine-reactive chemical cross-linking, as described in, e.g., U.S. Pat. No. 5,534,254; bifunctional antibodies, e.g., Fab fragments with different binding specificities dimerized through leucine zippers (e.g., c-fos and c-jun) that have replaced the constant domain, as described in, e.g., U.S. Pat. No. 5,582,996; bispecific and oligospecific mono- and oligovalent receptors, e.g., VH-CH1 regions of two antibodies (two Fab fragments) linked through a polypeptide spacer between the CH1 region of one antibody and the VH region of the other antibody typically with associated light chains, as described in, e.g., U.S. Pat. No. 5,591,828; bispecific DNA-antibody conjugates, e.g., crosslinking of antibodies or Fab fragments through a double stranded piece of DNA, as described in, e.g., U.S. Pat. No. 5,635,602; bispecific fusion proteins, e.g., an expression construct containing two scFvs with a hydrophilic helical peptide linker between them and a full constant region, as described in, e.g., U.S. Pat. No. 5,637,481; multivalent and multispecific binding proteins, e.g., dimer of polypeptides having first domain with binding region of Ig heavy chain variable region, and second domain with binding region of Ig light chain variable region, generally termed diabodies (higher order structures are also encompassed creating for bispecific, trispecific, or tetraspecific molecules, as described in, e.g., U.S. Pat. No. 5,837,242; minibody constructs with linked VL and VH chains further connected with peptide spacers to an antibody hinge region and CH3 region, which can be dimerized to form bispecific/multivalent molecules, as described in, e.g., U.S. Pat. No. 5,837,821; VH and VL domains linked with a short peptide linker (e.g., 5 or 10 amino acids) or no linker at all in either orientation, which can form dimers to form bispecific diabodies; trimers and tetramers, as described in, e.g., U.S. Pat. No. 5,844,094; String of VH domains (or VL domains in family members) connected by peptide linkages with crosslinkable groups at the C-terminus further associated with VL domains to form a series of FVs (or scFvs), as described in, e.g., U.S. Pat. No. 5,864,019; and single chain binding polypeptides with both a VH and a VL domain linked through a peptide linker are combined into multivalent structures through non-covalent or chemical crosslinking to form, e.g., homobivalent, heterobivalent, trivalent, and tetravalent structures using both scFV or diabody type format, as described in, e.g., U.S. Pat. No. 5,869,620. Additional exemplary multispecific and bispecific molecules and methods of making the same are found, for example, in U.S. Pat. Nos. 5,910,573, 5,932,448, 5,959,083, 5,989,830, 6,005,079, 6,239,259, 6,294,353, 6,333,396, 6,476,198, 6,511,663, 6,670,453, 6,743,896, 6,809,185, 6,833,441, 7,129,330, 7,183,076, 7,521,056, 7,527,787, 7,534,866, 7,612,181, US2002004587A1, US2002076406A1, US2002103345A1, US2003207346A1, US2003211078A1, US2004219643A1, US2004220388A1, US2004242847A1, US2005003403A1, US2005004352A1, US2005069552A1, US2005079170A1, US2005100543A1, US2005136049A1, US2005136051A1, US2005163782A1, US2005266425A1, US2006083747A1, US2006120960A1, US2006204493A1, US2006263367A1, US2007004909A1, US2007087381A1, US2007128150A1, US2007141049A1, US2007154901A1, US2007274985A1, US2008050370A1, US2008069820A1, US2008152645A1, US2008171855A1, US2008241884A1, US2008254512A1, US2008260738A1, US2009130106A1, US2009148905A1, US2009155275A1, US2009162359A1, US2009162360A1, US2009175851A1, US2009175867A1, US2009232811A1, US2009234105A1, US2009263392A1, US2009274649A1, EP346087A2, WO0006605A2, WO02072635A2, WO04081051A1, WO06020258A2, WO2007044887A2, WO2007095338A2, WO2007137760A2, WO2008119353A1, WO2009021754A2, WO2009068630A1, WO9103493A1, WO9323537A1, WO9409131A1, WO9412625A2, WO9509917A1, WO9637621A2, WO9964460A1. The contents of the above-referenced applications are incorporated herein by reference in their entireties.

[0640] Within each antibody or antibody fragment (e.g., scFv) of a bispecific antibody molecule, the VH can be upstream or downstream of the VL. In some embodiments, the upstream antibody or antibody fragment (e.g., scFv) is arranged with its VH (VH1) upstream of its VL (VL1) and the downstream antibody or antibody fragment (e.g., scFv) is arranged with its VL (VL₂) upstream of its VH (VH₂), such that the overall bispecific antibody molecule has the arrangement VH₁-VL₁-VL₂-VH₂. In other embodiments, the upstream antibody or antibody fragment (e.g., scFv) is arranged with its VL (VL1) upstream of its VH (VH1) and the downstream antibody or antibody fragment (e.g., scFv) is arranged with its VH (VH₂) upstream of its VL (VL₂), such that the overall bispecific antibody molecule has the arrangement VL₁-VH₁-VH₂-VL₂. Optionally, a linker is disposed between the two antibodies or antibody fragments (e.g., scFvs), e.g., between VL₁ and VL₂ if the construct is arranged as VH₁-VL₁-VL₂-VH₂, or between VH₁ and VH₂ if the construct is arranged as VL₁-VH₁-VH₂-VL₂. The linker may be a linker as described herein, e.g., a (Gly₄-Ser)n linker, wherein n is 1, 2, 3, 4, 5, or 6, e.g., 4 (SEQ ID NO: 53). In general, the linker between the two scFvs should be long enough to avoid mispairing between the domains of the two scFvs. Optionally, a linker is disposed between the VL and VH of the first scFv. Optionally, a linker is disposed between the VL and VH of the second scFv. In constructs that have multiple linkers, any two or more of the linkers can be the same or different. Accordingly, in some embodiments, a bispecific CAR comprises VLs, VHs, and optionally one or more linkers in an arrangement as described herein.

[0641] In certain embodiments the antibody molecule is a bispecific antibody molecule having a first binding specificity for a first B-cell epitope and a second binding specificity for another B-cell antigen. For instance, in some embodiments the bispecific antibody molecule has a first binding specificity for CD19 and a second binding specificity for one or more of CD10, CD20, CD22, CD34, CD123, FLT-3, ROR1, CD79b, CD179b, or CD79a. In some embodiments the bispecific antibody molecule has a first binding specificity for CD19 and a second binding specificity for CD22. Exemplary bispecific CAR19/CAR22 antibody molecules and sequences thereof, are described on page 62 and pages 501-506 of International Application WO 2016/164731, filed Apr. 8, 2016, which is incorporated by reference in its entirety.

### CAR Compositions

[0642] Compositions comprising cells that express a CAR molecule, e.g., a composition comprising: (i) one or more cells that express a CAR molecule that binds CD19, e.g., a CAR molecule that binds CD19 described herein, e.g., a CD19 CAR, and (ii) a B-cell inhibitor, e.g., one or more inhibitors of CD10, CD20, CD22, CD34, CD123, FLT-3, or ROR1, are described on pages 15-17 of International Application WO 2016/164731, filed Apr. 8, 2016, which is incorporated by reference in its entirety.

[0643] In one embodiment, a method of administration of a composition described herein includes administering a population of cells, a plurality of which comprise a CAR molecule described herein. In some embodiments, the population of CAR-expressing cells comprises a mixture of cells expressing different CARs. For example, in one embodiment, the population of CAR-expressing cells can include a first cell expressing a CAR having an anti-CD19 binding domain described herein, and a second cell expressing a CAR having a different B-cell antigen binding domain. In embodiments, the first and second cell populations are T cells. In embodiments, the first and second populations of T cells are the same isotype, e.g., are both CD4+ T cells, or are both CD8+ T cells. In other embodiments, the first and second populations of T cells are different isotypes, e.g., the first population comprises CD4+ T cells and the second population comprises CD8+ T cells. In embodiments, the first and second populations of T cells are cell types described in WO2012/129514, which is herein incorporated by reference in its entirety.

[0644] As another example, a population of cells can comprise a single cell type that expresses both a CAR having an anti-CD19 binding domain described herein and a CAR having a different B-cell antigen binding domain. As another example, a population of cells can comprise a single cell type that expresses a CAR having two or more (e.g., 2, 3, 4, or 5) B-cell antigen binding domains, e.g., is a bispecific CAR, e.g., as described herein.

[0645] In an embodiment, when the first B-cell inhibitor is a CD19 CAR-expressing cell and the second B-cell inhibitor is a CD10 CAR-expressing cell, the first CAR and second CAR may be expressed by the same cell type or different types. In another embodiment, when the first B-cell inhibitor is a CD19 CAR-expressing cell and the second B-cell inhibitor is a CD20 CAR-expressing cell, the first CAR and second CAR may be expressed by the same cell type or different types. In yet another embodiment, when the first B-cell inhibitor is a CD19 CAR-expressing cell and the second B-cell inhibitor is a CD22 CAR-expressing cell, the first CAR and second CAR may be expressed by the same cell type or different types.

[0646] In an embodiment, when the first B-cell inhibitor is a CD19 CAR-expressing cell and the second B-cell inhibitor is a CD34 CAR-expressing cell, the first CAR and second CAR may be expressed by the same cell type or different types. In another embodiment, when the first B-cell inhibitor is a CD19 CAR-expressing cell and the second B-cell inhibitor is a CD123 CAR-expressing cell, the first CAR and second CAR may be expressed by the same cell type or different types. In yet another embodiment, when the first B-cell inhibitor is a CD19 CAR-expressing cell and the second B-cell inhibitor is a FLT-3 CAR-expressing cell, the first CAR and second CAR may be expressed by the same cell type or different types. In an embodiment, when the first B-cell inhibitor is a CD19 CAR-expressing cell and the second B-cell inhibitor is a ROR1 CAR-expressing cell, the first CAR and second CAR may be expressed by the same cell type or different types.

[0647] More generally, when the first B-cell inhibitor comprises a CD19 CAR and there is a second B-cell inhibitor e.g., which comprises a second CAR, the first CAR and the second B-cell inhibitor may be expressed by the same cell type or different types. Exemplary cell populations comprising cells expressing different CAR molecules, and methods of using the same are described on pages 23-32 of International Application WO 2016/164731, filed Apr. 8, 2016, which is incorporated by reference in its entirety.

[0648] In embodiments, the cell expresses an inhibitory molecule that comprises a first polypeptide that comprises at least a portion of an inhibitory molecule, associated with a second polypeptide that comprises a positive signal from an intracellular signaling domain. In embodiments, the inhibitory molecule comprise first polypeptide that comprises at least a portion of PD1 and a second polypeptide comprising a costimulatory domain and primary signaling domain.

### Chimeric TCR

[0649] In one aspect, the antibodies and antibody fragments disclosed herein (e.g., those directed against CD10, CD19, CD20, CD22, CD34, CD123, FLT-3, ROR1, CD79b, CD179b, or CD79a) can be grafted to one or more constant domain of a T cell receptor (“TCR”) chain, for example, a TCR alpha or TCR beta chain, to create an chimeric TCR that binds specifically to a cancer associated antigen. Without being bound by theory, it is believed that chimeric TCRs will signal through the TCR complex upon antigen binding. For example, an scFv as disclosed herein, can be grafted to the constant domain, e.g., at least a portion of the extracellular constant domain, the transmembrane domain and the cytoplasmic domain, of a TCR chain, for example, the TCR alpha chain and/or the TCR beta chain. As another example, an antibody fragment, for example a VL domain as described herein, can be grafted to the constant domain of a TCR alpha chain, and an antibody fragment, for example a VH domain as described herein, can be grafted to the constant domain of a TCR beta chain (or alternatively, a VL domain may be grafted to the constant domain of the TCR beta chain and a VH domain may be grafted to a TCR alpha chain). As another example, the CDRs of an antibody or antibody fragment, e.g., the CDRs of an antibody or antibody fragment as described in any of the Tables herein may be grafted into a TCR alpha and/or beta chain to create a chimeric TCR that binds specifically to a cancer associated antigen. For example, the LC CDRs disclosed herein may be grafted into the variable domain of a TCR alpha chain and the HC CDRs disclosed herein may be grafted to the variable domain of a TCR beta chain, or vice versa. Such chimeric TCRs may be produced by any appropriate method (For example, Willemsen R A et al, Gene Therapy 2000; 7: 1369-1377; Zhang T et al, Cancer Gene Ther 2004; 11: 487-496; Aggen et al, Gene Ther. 2012 April; 19(4):365-74).

### Non-Antibody Scaffolds

[0650] In embodiments, the antigen binding domain comprises a non antibody scaffold, e.g., a fibronectin, ankyrin, domain antibody, lipocalin, small modular immuno-pharmaceutical, maxybody, Protein A, or affilin. In embodiments, the antigen binding domain is a polypeptide or fragment thereof of a naturally occurring protein expressed on a cell. In some embodiments, the antigen binding domain comprises a non-antibody scaffold.

[0651] Non-antibody scaffolds include: fibronectin (Novartis, Mass.), ankyrin (Molecular Partners AG, Zurich, Switzerland), domain antibodies (Domantis, Ltd., Cambridge, Mass., and Ablynx nv, Zwijnaarde, Belgium), lipocalin (Pieris Proteolab AG, Freising, Germany), small modular immuno-pharmaceuticals (Trubion Pharmaceuticals Inc., Seattle, Wash.), maxybodies (Avidia, Inc., Mountain View, Calif.), Protein A (Affibody AG, Sweden), and affilin (gamma-crystallin or ubiquitin) (Scil Proteins GmbH, Halle, Germany).

[0652] Additional and exemplary non-antibody scaffolds are described on pages 179-181 of International Application WO 2016/164731, filed Apr. 8, 2016, which is incorporated by reference in its entirety.

[0653] Transmembrane Domain

[0654] With respect to the transmembrane domain, in various embodiments, a CAR can be designed to comprise a transmembrane domain that is attached to the extracellular domain of the CAR. A transmembrane domain can include one or more additional amino acids adjacent to the transmembrane region, e.g., one or more amino acid associated with the extracellular region of the protein from which the transmembrane was derived (e.g., 1, 2, 3, 4, 5, 6, 7, 8, 9, 10 up to 15 amino acids of the extracellular region) and/or one or more additional amino acids associated with the intracellular region of the protein from which the transmembrane protein is derived (e.g., 1, 2, 3, 4, 5, 6, 7, 8, 9, 10 up to 15 amino acids of the intracellular region). In one aspect, the transmembrane domain is one that is associated with one of the other domains of the CAR, e.g., in one embodiment, the transmembrane domain may be from the same protein that the signaling domain, costimulatory domain or the hinge domain is derived from. In another aspect, the transmembrane domain is not derived from the same protein that any other domain of the CAR is derived from. In some instances, the transmembrane domain can be selected or modified by amino acid substitution to avoid binding of such domains to the transmembrane domains of the same or different surface membrane proteins, e.g., to minimize interactions with other members of the receptor complex. In one aspect, the transmembrane domain is capable of homodimerization with another CAR on the cell surface of a CAR-expressing cell. In a different aspect the amino acid sequence of the transmembrane domain may be modified or substituted so as to minimize interactions with the binding domains of the native binding partner present in the same CAR-expressing cell.

[0655] The transmembrane domain may be derived either from a natural or from a recombinant source. Where the source is natural, the domain may be derived from any membrane-bound or transmembrane protein. In one aspect the transmembrane domain is capable of signaling to the intracellular domain(s) whenever the CAR has bound to a target. A transmembrane domain of particular use in this invention may include at least the transmembrane region(s) of e.g., the alpha, beta or zeta chain of the T-cell receptor, CD28, CD3 epsilon, CD45, CD4, CD5, CD8, CD9, CD16, CD22, CD33, CD37, CD64, CD80, CD86, CD134, CD137, CD154. In some embodiments, a transmembrane domain may include at least the transmembrane region(s) of, e.g., KIRDS2, OX40, CD2, CD27, LFA-1 (CD11a, CD18), ICOS (CD278), 4-1BB (CD137), GITR, CD40, BAFFR, HVEM (LIGHTR), SLAMF7, NKp80 (KLRF1), NKp44, NKp30, NKp46, CD160, CD19, IL2R beta, IL2R gamma, IL7R α, ITGA1, VLA1, CD49a, ITGA4, IA4, CD49D, ITGA6, VLA-6, CD49f, ITGAD, CD11d, ITGAE, CD103, ITGAL, CD11a, LFA-1, ITGAM, CD11b, ITGAX, CD11c, ITGB1, CD29, ITGB2, CD18, LFA-1, ITGB7, TNFR2, DNAM1 (CD226), SLAMF4 (CD244, 2B4), CD84, CD96 (Tactile), CEACAM1, CRTAM, Ly9 (CD229), CD160 (BY55), PSGL1, CD100 (SEMA4D), SLAMF6 (NTB-A, Ly108), SLAM (SLAMF1, CD150, IPO-3), BLAME (SLAMF8), SELPLG (CD162), LTBR, PAG/Cbp, NKG2D, NKG2C, or CD19.

[0656] In some instances, the transmembrane domain can be attached to the extracellular region of the CAR, e.g., the antigen binding domain of the CAR, via a hinge, e.g., a hinge from a human protein. For example, in one embodiment, the hinge can be a human Ig (immunoglobulin) hinge, e.g., an IgG4 hinge, an IgD hinge, a GS linker (e.g., a GS linker described herein), a KIR2DS2 hinge, or a CD8a hinge. In one embodiment, the hinge or spacer comprises (e.g., consists of) the amino acid sequence of SEQ ID NO:14. In one aspect, the transmembrane domain comprises (e.g., consists of) a transmembrane domain of SEQ ID NO: 15.

[0657] In one aspect, the hinge or spacer comprises an IgG4 hinge. For example, in one embodiment, the hinge or spacer comprises a hinge of the amino acid sequence

(SEQ ID NO: 46)
GAGAGCAAGTACGGCCCTCCCTGCCCCCCTTGCCCTGCCCCCGAGTTCC
TGGGCGGACCCAGCGTGTTCCTGTTCCCCCCCAAGCCCAAGGACACCCT
GATGATCAGCCGGACCCCCGAGGTGACCTGTGTGGTGGTGGACGTGTCC
CAGGAGGACCCCGAGGTCCAGTTCAACTGGTACGTGGACGGCGTGGAGG
TGCACAACGCCAAGACCAAGCCCCGGGAGGAGCAGTTCAATAGCACCTA
CCGGGTGGTGTCCGTGCTGACCGTGCTGCACCAGGACTGGCTGAACGGC
AAGGAATACAAGTGTAAGGTGTCCAACAAGGGCCTGCCCAGCAGCATCG
AGAAAACCATCAGCAAGGCCAAGGGCCAGCCTCGGGAGCCCCAGGTGTA
CACCCTGCCCCCTAGCCAAGAGGAGATGACCAAGAACCAGGTGTCCCTG
ACCTGCCTGGTGAAGGGCTTCTACCCCAGCGACATCGCCGTGGAGTGGG
AGAGCAACGGCCAGCCCGAGAACAACTACAAGACCACCCCCCCTGTGCT
GGACAGCGACGGCAGCTTCTTCCTGTACAGCCGGCTGACCGTGGACAAG
AGCCGGTGGCAGGAGGGCAACGTCTTTAGCTGCTCCGTGATGCACGAGG
CCCTGCACAACCACTACACCCAGAAGAGCCTGAGCCTGTCCCTGGGCAA
GATG.

In some embodiments, the hinge or spacer comprises a hinge encoded by a nucleotide sequence of

(SEQ ID NO: 45)
ESKYGPPCPPCPAPEFLGGPSVFLFPPKPKDTLMISRTPEVTCVVVDVS
QEDPEVQFNWYVDGVEVHNAKTKPREEQFNSTYRVVSVLTVLHQDWLNG
KEYKCKVSNKGLPSSIEKTISKAKGQPREPQVYTLPPSQEEMTKNQVSL
TCLVKGFYPSDIAVEWESNGQPENNYKTTPPVLDSDGSFFLYSRLTVDK
SRWQEGNVFSCSVMHEALHNHYTQKSLSLSLGKM.

[0658] In one aspect, the hinge or spacer comprises an IgD hinge. For example, in one embodiment, the hinge or spacer comprises a hinge of the amino acid sequence

(SEQ ID NO: 47)
RWPESPKAQASSVPTAQPQAEGSLAKATTAPATTRNTGRGGEEKKKEKE
KEEQEERETKTPECPSHTQPLGVYLLTPAVQDLWLRDKATFTCFVVGSD
LKDAHLTWEVAGKVPTGGVEEGLLERHSNGSQSQHSRLTLPRSLWNAGT
SVTCTLNHPSLPPQRLMALREPAAQAPVKLSLNLLASSDPPEAASWLLC
EVSGFSPPNILLMWLEDQREVNTSGFAPARPPPQPGSTTFWAWSVLRVP
APPSPQPATYTCVVSHEDSRTLLNASRSLEVSYVTDH.

In some embodiments, the hinge or spacer comprises a hinge encoded by a nucleotide sequence of

(SEQ ID NO: 48)
AGGTGGCCCGAAAGTCCCAAGGCCCAGGCATCTAGTGTTCCTACTGCAC
AGCCCCAGGCAGAAGGCAGCCTAGCCAAAGCTACTACTGCACCTGCCAC
TACGCGCAATACTGGCCGTGGCGGGGAGGAGAAGAAAAAGGAGAAAGAG
AAAGAAGAACAGGAAGAGAGGGAGACCAAGACCCCTGAATGTCCATCCC
ATACCCAGCCGCTGGGCGTCTATCTCTTGACTCCCGCAGTACAGGACTT
GTGGCTTAGAGATAAGGCCACCTTTACATGTTTCGTCGTGGGCTCTGAC
CTGAAGGATGCCCATTTGACTTGGGAGGTTGCCGGAAAGGTACCCACAG
GGGGGGTTGAGGAAGGGTTGCTGGAGCGCCATTCCAATGGCTCTCAGAG
CCAGCACTCAAGACTCACCCTTCCGAGATCCCTGTGGAACGCCGGGACC
TCTGTCACATGTACTCTAAATCATCCTAGCCTGCCCCCACAGCGTCTGA
TGGCCCTTAGAGAGCCAGCCGCCCAGGCACCAGTTAAGCTTAGCCTGAA
TCTGCTCGCCAGTAGTGATCCCCCAGAGGCCGCCAGCTGGCTCTTATGC
GAAGTGTCCGGCTTTAGCCCGCCCAACATCTTGCTCATGTGGCTGGAGG
ACCAGCGAGAAGTGAACACCAGCGGCTTCGCTCCAGCCCGGCCCCCACC
CCAGCCGGGTTCTACCACATTCTGGGCCTGGAGTGTCTTAAGGGTCCCA
GCACCACCTAGCCCCCAGCCAGCCACATACACCTGTGTTGTGTCCCATG
AAGATAGCAGGACCCTGCTAAATGCTTCTAGGAGTCTGGAGGTTTCCTA
CGTGACTGACCATT.

[0659] In one aspect, the transmembrane domain may be recombinant, in which case it will comprise predominantly hydrophobic residues such as leucine and valine. In one aspect a triplet of phenylalanine, tryptophan and valine can be found at each end of a recombinant transmembrane domain.

[0660] Optionally, a short oligo- or polypeptide linker, between 2 and 10 amino acids in length may form the linkage between the transmembrane domain and the cytoplasmic region of the CAR. A glycine-serine doublet provides a particularly suitable linker. For example, in one aspect, the linker comprises the amino acid sequence of GGGGSGGGGS (SEQ ID NO:49). In some embodiments, the linker is encoded by a nucleotide sequence of

(SEQ ID NO: 50)
GGTGGCGGAGGTTCTGGAGGTGGAGGTTCC.

[0661] In one aspect, the hinge or spacer comprises a KIR2DS2 hinge.

[0662] Cytoplasmic Domain

[0663] The cytoplasmic domain or region of the CAR includes an intracellular signaling domain. An intracellular signaling domain is generally responsible for activation of at least one of the normal effector functions of the immune cell in which the CAR has been introduced.

[0664] Examples of intracellular signaling domains for use in the CAR of the invention include the cytoplasmic sequences of the T cell receptor (TCR) and co-receptors that act in concert to initiate signal transduction following antigen receptor engagement, as well as any derivative or variant of these sequences and any recombinant sequence that has the same functional capability.

[0665] It is known that signals generated through the TCR alone are insufficient for full activation of the T cell and that a secondary and/or costimulatory signal is also required. Thus, T cell activation can be said to be mediated by two distinct classes of cytoplasmic signaling sequences: those that initiate antigen-dependent primary activation through the TCR (primary intracellular signaling domains) and those that act in an antigen-independent manner to provide a secondary or costimulatory signal (secondary cytoplasmic domain, e.g., a costimulatory domain).

[0666] A primary signaling domain regulates primary activation of the TCR complex either in a stimulatory way, or in an inhibitory way. Primary intracellular signaling domains that act in a stimulatory manner may contain signaling motifs which are known as immunoreceptor tyrosine-based activation motifs or ITAMs.

[0667] Examples of ITAM containing primary intracellular signaling domains that are of particular use in the invention include those of CD3 zeta, common FcR gamma (FCER1G), Fc gamma RIIa, FcR beta (Fc Epsilon Rib), CD3 gamma, CD3 delta, CD3 epsilon, CD79a, CD79b, CD278 (also known as “ICOS”), FcεRI, DAP10, DAP12, and CD66d. In one embodiment, a CAR of the invention comprises an intracellular signaling domain, e.g., a primary signaling domain of CD3-zeta.

[0668] In one embodiment, a primary signaling domain comprises a modified ITAM domain, e.g., a mutated ITAM domain which has altered (e.g., increased or decreased) activity as compared to the native ITAM domain. In one embodiment, a primary signaling domain comprises a modified ITAM-containing primary intracellular signaling domain, e.g., an optimized and/or truncated ITAM-containing primary intracellular signaling domain. In an embodiment, a primary signaling domain comprises one, two, three, four or more ITAM motifs.

[0669] Further examples of molecules containing a primary intracellular signaling domain that are of particular use in the invention include those of DAP10, DAP12, and CD32.

### Costimulatory Signaling Domain

[0670] The intracellular signalling domain of the CAR can comprise the CD3-zeta signaling domain by itself or it can be combined with any other desired intracellular signaling domain(s) useful in the context of a CAR of the invention. For example, the intracellular signaling domain of the CAR can comprise a CD3 zeta chain portion and a costimulatory signaling domain. The costimulatory signaling domain refers to a portion of the CAR comprising the intracellular domain of a costimulatory molecule. In one embodiment, the intracellular domain is designed to comprise the signaling domain of CD3-zeta and the signaling domain of CD28. In one aspect, the intracellular domain is designed to comprise the signaling domain of CD3-zeta and the signaling domain of ICOS.

[0671] A costimulatory molecule can be a cell surface molecule other than an antigen receptor or its ligands that is required for an efficient response of lymphocytes to an antigen. Examples of such molecules include CD27, CD28, 4-1BB (CD137), OX40, CD30, CD40, PD1, ICOS, lymphocyte function-associated antigen-1 (LFA-1), CD2, CD7, LIGHT, NKG2C, B7-H3, and a ligand that specifically binds with CD83, and the like. For example, CD27 costimulation has been demonstrated to enhance expansion, effector function, and survival of human CART cells in vitro and augments human T cell persistence and antitumor activity in vivo (Song et al. Blood. 2012; 119(3):696-706). Further examples of such costimulatory molecules include MHC class I molecule, TNF receptor proteins, Immunoglobulin-like proteins, cytokine receptors, integrins, signaling lymphocytic activation molecules (SLAM proteins), activating NK cell receptors, BTLA, a Toll ligand receptor, OX40, CD2, CD7, CD27, CD28, CD30, CD40, CDS, ICAM-1, LFA-1 (CD11a/CD18), 4-1BB (CD137), B7-H3, CDS, ICAM-1, ICOS (CD278), GITR, BAFFR, LIGHT, HVEM (LIGHTR), KIRDS2, SLAMF7, NKp80 (KLRF1), NKp44, NKp30, NKp46, CD19, CD4, CD8alpha, CD8beta, IL2R beta, IL2R gamma, IL7R alpha, ITGA4, VLA1, CD49a, ITGA4, IA4, CD49D, ITGA6, VLA-6, CD49f, ITGAD, CD11d, ITGAE, CD103, ITGAL, CD11a, LFA-1, ITGAM, CD11b, ITGAX, CD11c, ITGB1, CD29, ITGB2, CD18, LFA-1, ITGB7, NKG2D, NKG2C, TNFR2, TRANCE/RANKL, DNAM1 (CD226), SLAMF4 (CD244, 2B4), CD84, CD96 (Tactile), CEACAM1, CRTAM, Ly9 (CD229), CD160 (BY55), PSGL1, CD100 (SEMA4D), CD69, SLAMF6 (NTB-A, Ly108), SLAM (SLAMF1, CD150, IPO-3), BLAME (SLAMF8), SELPLG (CD162), LTBR, LAT, GADS, SLP-76, PAG/Cbp, CD19a, and a ligand that specifically binds with CD83.

[0672] The intracellular signaling sequences within the cytoplasmic portion of the CAR of the invention may be linked to each other in a random or specified order. Optionally, a short oligo- or polypeptide linker, for example, between 2 and 10 amino acids (e.g., 2, 3, 4, 5, 6, 7, 8, 9, or 10 amino acids) in length may form the linkage between intracellular signaling sequence. In one embodiment, a glycine-serine doublet can be used as a suitable linker. In one embodiment, a single amino acid, e.g., an alanine, a glycine, can be used as a suitable linker.

[0673] In one aspect, the intracellular signaling domain is designed to comprise two or more, e.g., 2, 3, 4, 5, or more, costimulatory signaling domains. In an embodiment, the two or more, e.g., 2, 3, 4, 5, or more, costimulatory signaling domains, are separated by a linker molecule, e.g., a linker molecule described herein. In one embodiment, the intracellular signaling domain comprises two costimulatory signaling domains. In some embodiments, the linker molecule is a glycine residue. In some embodiments, the linker is an alanine residue.

[0674] In one aspect, the intracellular signaling domain is designed to comprise the signaling domain of CD3-zeta and the signaling domain of CD28. In one aspect, the intracellular signaling domain is designed to comprise the signaling domain of CD3-zeta and the signaling domain of 4-1BB. In one aspect, the signaling domain of 4-1BB is a signaling domain of SEQ ID NO: 16. In one aspect, the signaling domain of CD3-zeta is a signaling domain of SEQ ID NO: 17.

[0675] In one aspect, the intracellular signaling domain is designed to comprise the signaling domain of CD3-zeta and the signaling domain of CD27. In one aspect, the signaling domain of CD27 comprises an amino acid sequence of

(SEQ ID NO: 51)
QRRKYRSNKGESPVEPAEPCRYSCPREEEGSTIPIQEDYRKPEPACSP.

In one aspect, the signalling domain of CD27 is encoded by a nucleic acid sequence of

(SEQ ID NO: 52)
AGGAGTAAGAGGAGCAGGCTCCTGCACAGTGACTACATGAACATGACTCC
CCGCCGCCCCGGGCCCACCCGCAAGCATTACCAGCCCTATGCCCCACCAC
GCGACTTCGCAGCCTATCGCTCC.

### Natural Killer Cell Receptor (NKR) CARs

[0676] In an embodiment, a CAR molecule described herein comprises one or more components of a natural killer cell receptor (NKR), thereby forming an NKR-CAR. The NKR component can be a transmembrane domain, a hinge domain, or a cytoplasmic domain from any of the following natural killer cell receptors: killer cell immunoglobulin-like receptor (KIR), e.g., KIR2DL1, KIR2DL2/L3, KIR2DL4, KIR2DL5A, KIR2DL5B, KIR2DS1, KIR2DS2, KIR2DS3, KIR2DS4, DIR2DS5, KIR3DL1/S1, KIR3DL2, KIR3DL3, KIR2DP1, and KIR3DP1; natural cytotoxicity receptor (NCR), e.g., NKp30, NKp44, NKp46; signaling lymphocyte activation molecule (SLAM) family of immune cell receptors, e.g., CD48, CD229, 2B4, CD84, NTB-A, CRACC, BLAME, and CD2F-10; Fc receptor (FcR), e.g., CD16, and CD64; and Ly49 receptors, e.g., LY49A, LY49C. The NKR-CAR molecules described herein may interact with an adaptor molecule or intracellular signaling domain, e.g., DAP12. Exemplary configurations and sequences of CAR molecules comprising NKR components are described in International Publication No. WO2014/145252, the contents of which are hereby incorporated by reference.

### Strategies for Regulating Chimeric Antigen Receptors

[0677] In some embodiments, a regulatable CAR (RCAR) where the CAR activity can be controlled is desirable to optimize the safety and efficacy of a CAR therapy. There are many ways CAR activities can be regulated. For example, inducing apoptosis using, e.g., a caspase fused to a dimerization domain (see, e.g., Di et al., N Engl. J. Med. 2011 Nov. 3; 365(18):1673-1683), can be used as a safety switch in the CAR therapy of the instant invention. In one embodiment, the cells (e.g., T cells or NK cells) expressing a CAR of the present invention further comprise an inducible apoptosis switch, wherein a human caspase (e.g., caspase 9) or a modified version is fused to a modification of the human FKB protein that allows conditional dimerization. In the presence of a small molecule, such as a rapalog (e.g., AP 1903, AP20187), the inducible caspase (e.g., caspase 9) is activated and leads to the rapid apoptosis and death of the cells (e.g., T cells or NK cells) expressing a CAR of the present invention. Examples of a caspase-based inducible apoptosis switch (or one or more aspects of such a switch) have been described in, e.g., US2004040047; US20110286980; US20140255360; WO1997031899; WO2014151960; WO2014164348; WO2014197638; WO2014197638; all of which are incorporated by reference herein.

[0678] In another example, CAR-expressing cells can also express an inducible Caspase-9 (iCaspase-9) molecule that, upon administration of a dimerizer drug (e.g., rimiducid (also called AP1903 (Bellicum Pharmaceuticals) or AP20187 (Ariad)) leads to activation of the Caspase-9 and apoptosis of the cells. The iCaspase-9 molecule contains a chemical inducer of dimerization (CID) binding domain that mediates dimerization in the presence of a CID. This results in inducible and selective depletion of CAR-expressing cells. In some cases, the iCaspase-9 molecule is encoded by a nucleic acid molecule separate from the CAR-encoding vector(s). In some cases, the iCaspase-9 molecule is encoded by the same nucleic acid molecule as the CAR-encoding vector. The iCaspase-9 can provide a safety switch to avoid any toxicity of CAR-expressing cells. See, e.g., Song et al. Cancer Gene Ther. 2008; 15(10):667-75; Clinical Trial Id. No. NCT02107963; and Di Stasi et al. N. Engl. J. Med. 2011; 365:1673-83.

[0679] Alternative strategies for regulating the CAR therapy of the instant invention include utilizing small molecules or antibodies that deactivate or turn off CAR activity, e.g., by deleting CAR-expressing cells, e.g., by inducing antibody dependent cell-mediated cytotoxicity (ADCC). For example, CAR-expressing cells described herein may also express an antigen that is recognized by molecules capable of inducing cell death, e.g., ADCC or complement-induced cell death. For example, CAR expressing cells described herein may also express a receptor capable of being targeted by an antibody or antibody fragment. Examples of such receptors include EpCAM, VEGFR, integrins (e.g., integrins αvβ3, α4, αI3/4β3, α4β7, α5β1, αvβ3, αv), members of the TNF receptor superfamily (e.g., TRAIL-R1, TRAIL-R2), PDGF Receptor, interferon receptor, folate receptor, GPNMB, ICAM-1, HLA-DR, CEA, CA-125, MUC1, TAG-72, IL-6 receptor, 5T4, GD2, GD3, CD2, CD3, CD4, CD5, CD1 1, CD1 1 a/LFA-1, CD15, CD18/ITGB2, CD19, CD20, CD22, CD23/lgE Receptor, CD25, CD28, CD30, CD33, CD38, CD40, CD41, CD44, CD51, CD52, CD62L, CD74, CD80, CD125, CD147/basigin, CD152/CTLA-4, CD154/CD40L, CD195/CCR5, CD319/SLAMF7, and EGFR, and truncated versions thereof (e.g., versions preserving one or more extracellular epitopes but lacking one or more regions within the cytoplasmic domain).

[0680] For example, a CAR-expressing cell described herein may also express a truncated epidermal growth factor receptor (EGFR) which lacks signaling capacity but retains the epitope that is recognized by molecules capable of inducing ADCC, e.g., cetuximab (ERBITUX®), such that administration of cetuximab induces ADCC and subsequent depletion of the CAR-expressing cells (see, e.g., WO2011/056894, and Jonnalagadda et al., Gene Ther. 2013; 20(8)853-860). Another strategy includes expressing a highly compact marker/suicide gene that combines target epitopes from both CD32 and CD20 antigens in the CAR-expressing cells described herein, which binds rituximab, resulting in selective depletion of the CAR-expressing cells, e.g., by ADCC (see, e.g., Philip et al., Blood. 2014; 124(8)1277-1287). Other methods for depleting CAR-expressing cells described herein include administration of CAMPATH, a monoclonal anti-CD52 antibody that selectively binds and targets mature lymphocytes, e.g., CAR-expressing cells, for destruction, e.g., by inducing ADCC. In other embodiments, the CAR-expressing cell can be selectively targeted using a CAR ligand, e.g., an anti-idiotypic antibody. In some embodiments, the anti-idiotypic antibody can cause effector cell activity, e.g., ADCC or ADC activities, thereby reducing the number of CAR-expressing cells. In other embodiments, the CAR ligand, e.g., the anti-idiotypic antibody, can be coupled to an agent that induces cell killing, e.g., a toxin, thereby reducing the number of CAR-expressing cells. Alternatively, the CAR molecules themselves can be configured such that the activity can be regulated, e.g., turned on and off, as described below.

[0681] In other embodiments, a CAR-expressing cell described herein may also express a target protein recognized by the T cell depleting agent. In one embodiment, the target protein is CD20 and the T cell depleting agent is an anti-CD20 antibody, e.g., rituximab. In such embodiment, the T cell depleting agent is administered once it is desirable to reduce or eliminate the CAR-expressing cell, e.g., to mitigate the CAR induced toxicity. In other embodiments, the T cell depleting agent is an anti-CD52 antibody, e.g., alemtuzumab.

[0682] In an aspect, a RCAR comprises a set of polypeptides, typically two in the simplest embodiments, in which the components of a standard CAR described herein, e.g., an antigen binding domain and an intracellular signaling domain, are partitioned on separate polypeptides or members. In some embodiments, the set of polypeptides include a dimerization switch that, upon the presence of a dimerization molecule, can couple the polypeptides to one another, e.g., can couple an antigen binding domain to an intracellular signaling domain. In one embodiment, a CAR of the present invention utilizes a dimerization switch as those described in, e.g., WO2014127261, which is incorporated by reference herein. Additional description and exemplary configurations of such regulatable CARs are provided herein and in International Publication No. WO 2015/090229, hereby incorporated by reference in its entirety.

[0683] In some embodiments, an RCAR involves a switch domain, e.g., a FKBP switch domain, as set out SEQ ID NO: 122, or comprise a fragment of FKBP having the ability to bind with FRB, e.g., as set out in SEQ ID NO: 123. In some embodiments, the RCAR involves a switch domain comprising a FRB sequence, e.g., as set out in SEQ ID NO: 124, or a mutant FRB sequence, e.g., as set out in any of SEQ ID Nos. 125-130.

(SEQ ID NO: 122)
D V P D Y A S L G G P S S P K K K R K V S R G V Q
V E T I S P G D G R T F P K R G Q T C V V H Y T G
M L E D G K K F D S S R D R N K P F K F M L G K Q
E V I R G W E E G V A Q M S V G Q R A K L T I S P
D Y A Y G A T G H P G I I P P H A T L V F D V E L
L K L E T S Y
(SEQ ID NO: 123)
V Q V E T I S P G D G R T F P K R G Q T C V V H Y
T G M L E D G K K F D S S R D R N K P F K F M L G
K Q E V I R G W E E G V A Q M S V G Q R A K L T I
S P D Y A Y G A T G H P G I I P P H A T L V F D V
E L L K L E T S
(SEQ ID NO: 124)
[sequence omitted]

TABLE 1
Exemplary mutant FRB having increased affinity for a dimerization molecule.

| | | SEQ |
|---|---|---|
| FRB mutant | Amino Acid Sequence | ID NO: |
| E2032I mutant | ILWHEMWHEGLIEASRLYFGERNVKGMFEVLEPLHAMMERGPQTLKETSFNQAYGR | 125 |
| | DLMEAQEWCRKYMKSGNVKDLTQAWDLYYHVFRRISKTS | |
| E2032L mutant | ILWHEMWHEGLLEASRLYFGERNVKGMFEVLEPLHAMMERGPQTLKETSFNQAYGR | 126 |
| | DLMEAQEWCRKYMKSGNVKDLTQAWDLYYHVFRRISKTS | |
| T2098L mutant | ILWHEMWHEGLEEASRLYFGERNVKGMFEVLEPLHAMMERGPQTLKETSFNQAYGR | 127 |
| | DLMEAQEWCRKYMKSGNVKDLLQAWDLYYHVFRRISKTS | |
| E2032, T2098 | ILWHEMWHEGLXEASRLYFGERNVKGMFEVLEPLHAMMERGPQTLKETSFNQAYGR | 128 |
| mutant | DLMEAQEWCRKYMKSGNVKDLXQAWDLYYHVFRRISKTS | |
| E2032I, T2098L | ILWHEMWHEGLIEASRLYFGERNVKGMFEVLEPLHAMMERGPQTLKETSFNQAYGR | 129 |
| mutant | DLMEAQEWCRKYMKSGNVKDLLQAWDLYYHVERRISKTS | |
| E2032L, T2098L | ILWHEMWHEGLLEASRLYFGERNVKGMFEVLEPLHAMMERGPQTLKETSFNQAYGR | 130 |
| mutant | DLMEAQEWCRKYMKSGNVKDLLQAWDLYYHVERRISKTS | |

### Split CAR

[0684] In some embodiments, the CAR-expressing cell uses a split CAR. The split CAR approach is described in more detail in publications WO2014/055442 and WO2014/055657. Briefly, a split CAR system comprises a cell expressing a first CAR having a first antigen binding domain and a costimulatory domain (e.g., 41BB), and the cell also expresses a second CAR having a second antigen binding domain and an intracellular signaling domain (e.g., CD3 zeta). When the cell encounters the first antigen, the costimulatory domain is activated, and the cell proliferates. When the cell encounters the second antigen, the intracellular signaling domain is activated and cell-killing activity begins. Thus, the CAR-expressing cell is only fully activated in the presence of both antigens.

### RNA Transfection

[0685] Disclosed herein are methods for producing an in vitro transcribed RNA CAR. The present invention also includes (among other things) a CAR encoding RNA construct that can be directly transfected into a cell. A method for generating mRNA for use in transfection can involve in vitro transcription (IVT) of a template with specially designed primers, followed by polyA addition, to produce a construct containing 3′ and 5′ untranslated sequence (“UTR”), a 5′ cap and/or Internal Ribosome Entry Site (IRES), the nucleic acid to be expressed, and a polyA tail, typically 50-2000 bases in length (SEQ ID NO:118).

[0686] In one aspect the CAR is encoded by a messenger RNA (mRNA). In one aspect the mRNA encoding the CAR is introduced into an immune effector cell, e.g., a T cell or a NK cell, for production of a CAR-expressing cell, e.g., a CART cell or a CAR NK cell. In one embodiment, the in vitro transcribed RNA CAR can be introduced to a cell as a form of transient transfection.

[0687] Additional method of RNA transfection are described on pages 192-196 of International Application WO 2016/164731, filed Apr. 8, 2016, which is incorporated by reference in its entirety.

### Non-Viral Delivery Methods

[0688] In some aspects, non-viral methods can be used to deliver a nucleic acid encoding a CAR described herein into a cell or tissue or a subject. In some embodiments, the non-viral method includes the use of a transposon (also called a transposable element). In some embodiments, a transposon is a piece of DNA that can insert itself at a location in a genome, for example, a piece of DNA that is capable of self-replicating and inserting its copy into a genome, or a piece of DNA that can be spliced out of a longer nucleic acid and inserted into another place in a genome.

[0689] Additional and exemplary transposons and non-viral delivery methods are described on pages 196-198 of International Application WO 2016/164731, filed Apr. 8, 2016, which is incorporated by reference in its entirety.

### Nucleic Acid Constructs Encoding a CAR

[0690] The present invention also provides nucleic acid molecules encoding one or more CAR 20 constructs described herein, e.g., CD19 CAR, CD20 CAR, or CD22 CAR. In one aspect, the nucleic acid molecule is provided as a messenger RNA transcript. In one aspect, the nucleic acid molecule is provided as a DNA construct.

[0691] Accordingly, in one aspect, the invention pertains to an isolated nucleic acid molecule encoding a chimeric antigen receptor (CAR), wherein the CAR comprises a binding domain (e.g., that binds CD19, CD20, or CD22) a transmembrane domain, and an intracellular signaling domain comprising a stimulatory domain, e.g., a costimulatory signaling domain and/or a primary signaling domain, e.g., zeta chain.

[0692] In one embodiment, the binding domain is an anti-CD19 binding domain described herein, e.g., an anti-CD19 binding domain which comprises a sequence selected from a group 30 consisting of SEQ ID NO:1, SEQ ID NO:2, SEQ ID NO:3, SEQ ID NO:4, SEQ ID NO:5, SEQ ID NO:6, SEQ ID NO:7, SEQ ID NO:8, SEQ ID NO:9, SEQ ID NO:10, SEQ ID NO:11, SEQ ID NO:12 and SEQ ID NO:59, or a sequence with 95-99% identity thereof.

[0693] In one embodiment, the nucleic acid comprises CD22-encoding a nucleic acid set out in 5 Table 6A on pages 364-403 of International Application WO 2016/164731, filed Apr. 8, 2016, which is incorporated by reference in its entirety, or a sequence with 95-99% identity thereof

[0694] In one embodiment, the nucleic acid comprises CD20-encoding a nucleic acid set out in Table 11A on pages 422-446 of International Application WO 2016/164731, filed Apr. 8, 2016, which is incorporated by reference in its entirety, or a sequence with 95-99% identity thereof.

[0695] In one embodiment, the transmembrane domain is transmembrane domain of a protein selected from the group consisting of the alpha, beta or zeta chain of the T-cell receptor, CD28, CD3 epsilon, CD45, CD4, CD5, CD8, CD9, CD16, CD22, CD33, CD37, CD64, CD80, CD86, CD134, CD137 and CD154. In one embodiment, the transmembrane domain comprises a sequence of SEQ ID NO: 15, or a sequence with 95-99% identity thereof. In one embodiment, the anti-CD19 binding domain is connected to the transmembrane domain by a hinge region, e.g., a hinge described herein. In one embodiment, the hinge region comprises SEQ ID NO:14 or SEQ ID NO:45 or SEQ ID NO:47 or SEQ ID NO:49, or a sequence with 95-99% identity thereof. In one embodiment, the isolated nucleic acid molecule further comprises a sequence encoding a costimulatory domain. In one embodiment, the costimulatory domain is a functional signaling domain of a protein selected from the group consisting of OX40, CD27, CD28, CDS, ICAM-1, LFA-1 (CD11a/CD18), ICOS (CD278), and 4-1BB (CD137). In one embodiment, the costimulatory domain is a functional signaling domain of a protein selected from the group consisting of MHC class I molecule, TNF receptor proteins, Immunoglobulin-like proteins, cytokine receptors, integrins, signaling lymphocytic activation molecules (SLAM proteins), activating NK cell receptors, BTLA, a Toll ligand receptor, OX40, CD2, CD7, CD27, CD28, CD30, CD40, CDS, ICAM-1, LFA-1 (CD11a/CD18), 4-1BB (CD137), B7-H3, CDS, ICAM-1, ICOS (CD278), GITR, BAFFR, LIGHT, HVEM (LIGHTR), KIRDS2, SLAMF7, NKp80 (KLRF1), NKp44, NKp30, NKp46, CD19, CD4, CD8alpha, CD8beta, IL2R beta, IL2R gamma, IL7R alpha, ITGA4, VLA1, CD49a, ITGA4, IA4, CD49D, ITGA6, VLA-6, CD49f, ITGAD, CD11d, ITGAE, CD103, ITGAL, CD11a, LFA-1, ITGAM, CD11b, ITGAX, CD11c, ITGB1, CD29, ITGB2, CD18, LFA-1, ITGB7, NKG2D, NKG2C, TNFR2, TRANCE/RANKL, DNAM1 (CD226), SLAMF4 (CD244, 2B4), CD84, CD96 (Tactile), CEACAM1, CRTAM, Ly9 (CD229), CD160 (BY55), PSGL1, CD100 (SEMA4D), CD69, SLAMF6 (NTB-A, Ly108), SLAM (SLAMF1, CD150, IPO-3), BLAME (SLAMF8), SELPLG (CD162), LTBR, LAT, GADS, SLP-76, PAG/Cbp, CD19a, and a ligand that specifically binds with CD83. In one embodiment, the costimulatory domain comprises a sequence of SEQ ID NO:16, or a sequence with 95-99% identity thereof. In one embodiment, the intracellular signaling domain comprises a functional signaling domain of 4-1BB and a functional signaling domain of CD3 zeta. In one embodiment, the intracellular signaling domain comprises the sequence of SEQ ID NO: 16 or SEQ ID NO:51, or a sequence with 95-99% identity thereof, and the sequence of SEQ ID NO: 17 or SEQ ID NO:43, or a sequence with 95-99% identity thereof, wherein the sequences comprising the intracellular signaling domain are expressed in the same frame and as a single polypeptide chain.

[0696] In another aspect, the invention pertains to an isolated nucleic acid molecule encoding a CAR construct comprising a leader sequence of SEQ ID NO: 13, a scFv domain having a sequence selected from the group consisting of SEQ ID NO:1, SEQ ID NO:2, SEQ ID NO:3, SEQ ID NO:4, SEQ ID NO:5, SEQ ID NO:6, SEQ ID NO:7, SEQ ID NO:8, SEQ ID NO:9, SEQ ID NO:10, SEQ ID NO:11, SEQ ID NO:12, and SEQ ID NO:59, (or a sequence with 95-99% identity thereof), a hinge region of SEQ ID NO:14 or SEQ ID NO:45 or SEQ ID NO:47 or SEQ ID NO:49 (or a sequence with 95-99% identity thereof), a transmembrane domain having a sequence of SEQ ID NO: 15 (or a sequence with 95-99% identity thereof), a 4-1BB costimulatory domain having a sequence of SEQ ID NO:16 or a CD27 costimulatory domain having a sequence of SEQ ID NO:51 (or a sequence with 95-99% identity thereof), and a CD3 zeta stimulatory domain having a sequence of SEQ ID NO:17 or SEQ ID NO:43 (or a sequence with 95-99% identity thereof).

[0697] In another aspect, the invention pertains to an isolated polypeptide molecule encoded by the nucleic acid molecule. In one embodiment, the isolated polypeptide molecule comprises a sequence selected from the group consisting of SEQ ID NO:31, SEQ ID NO:32, SEQ ID NO:33, SEQ ID NO:34, SEQ ID NO:35, SEQ ID NO:36, SEQ ID NO:37, SEQ ID NO:38, SEQ ID NO:39, SEQ ID NO:40, SEQ ID NO:41, SEQ ID NO:42, SEQ ID NO:59 or a sequence with 95-99% identity thereof.

[0698] In another aspect, the invention pertains to a nucleic acid molecule encoding a chimeric antigen receptor (CAR) molecule that comprises an anti-CD19 binding domain, a transmembrane domain, and an intracellular signaling domain comprising a stimulatory domain, and wherein said anti-CD19 binding domain comprises a sequence selected from the group consisting of SEQ ID NO:1, SEQ ID NO:2, SEQ ID NO:3, SEQ ID NO:4, SEQ ID NO:5, SEQ ID NO:6, SEQ ID NO:7, SEQ ID NO:8, SEQ ID NO:9, SEQ ID NO:10, SEQ ID NO:11, SEQ ID NO:12 and SEQ 5 ID NO:59, or a sequence with 95-99% identity thereof.

[0699] In one embodiment, the encoded CAR molecule (e.g., CD19 CAR, CD20 CAR, or CD22 CAR) further comprises a sequence encoding a costimulatory domain. In one embodiment, the costimulatory domain is a functional signaling domain of a protein selected from the group consisting of OX40, CD27, CD28, CDS, ICAM-1, LFA-1 (CD11a/CD18) and 4-1BB (CD137). In one embodiment, the costimulatory domain comprises a sequence of SEQ ID NO:16. In one embodiment, the transmembrane domain is a transmembrane domain of a protein selected from the group consisting of the alpha, beta or zeta chain of the T-cell receptor, CD28, CD3 epsilon, CD45, CD4, CD5, CD8, CD9, CD16, CD22, CD33, CD37, CD64, CD80, CD86, CD134, CD137 and CD154. In one embodiment, the transmembrane domain comprises a sequence of SEQ ID NO:15. In one embodiment, the intracellular signaling domain comprises a functional signaling domain of 4-1BB and a functional signaling domain of zeta. In one embodiment, the intracellular signaling domain comprises the sequence of SEQ ID NO: 16 and the sequence of SEQ ID NO: 17, wherein the sequences comprising the intracellular signaling domain are expressed in the same frame and as a single polypeptide chain. In one embodiment, the anti-CD19 binding domain is connected to the transmembrane domain by a hinge region. In one embodiment, the hinge region comprises SEQ ID NO:14. In one embodiment, the hinge region comprises SEQ ID NO:45 or SEQ ID NO:47 or SEQ ID NO:49.

[0700] In another aspect, the invention pertains to an encoded CAR molecule comprising a leader sequence of SEQ ID NO: 13, a scFv domain having a sequence selected from the group consisting of SEQ ID NO:1, SEQ ID NO:2, SEQ ID NO:3, SEQ ID NO:4, SEQ ID NO:5, SEQ ID NO:6, SEQ ID NO:7, SEQ ID NO:8, SEQ ID NO:9, SEQ ID NO:10, SEQ ID NO:11, SEQ ID NO:12, and SEQ ID NO:59, or a sequence with 95-99% identity thereof, a hinge region of SEQ ID NO:14 or SEQ ID NO:45 or SEQ ID NO:47 or SEQ ID NO:49, a transmembrane domain having a sequence of SEQ ID NO: 15, a 4-1BB costimulatory domain having a sequence of SEQ ID NO:16 or a CD27 costimulatory domain having a sequence of SEQ ID NO:51, and a CD3 zeta stimulatory domain having a sequence of SEQ ID NO:17 or SEQ ID NO:43. In one embodiment, the encoded CAR molecule comprises a sequence selected from a group consisting of SEQ ID NO:31, SEQ ID NO:32, SEQ ID NO:33, SEQ ID NO:34, SEQ ID NO:35, SEQ ID NO:36, SEQ ID NO:37, SEQ ID NO:38, SEQ ID NO:39, SEQ ID NO:40, SEQ ID NO:41, SEQ ID NO:42, and SEQ ID NO:59, or a sequence with 95-99% identity thereof.

[0701] The nucleic acid sequences coding for the desired molecules can be obtained using recombinant methods known in the art, such as, for example by screening libraries from cells expressing the gene, by deriving the gene from a vector known to include the same, or by isolating directly from cells and tissues containing the same, using standard techniques. Alternatively, the gene of interest can be produced synthetically, rather than cloned.

[0702] The present invention also provides vectors in which a DNA of the present invention is inserted. Vectors derived from retroviruses such as the lentivirus are suitable tools to achieve long-term gene transfer since they allow long-term, stable integration of a transgene and its propagation in daughter cells. Lentiviral vectors have the added advantage over vectors derived from onco-retroviruses such as murine leukemia viruses in that they can transduce non-proliferating cells, such as hepatocytes. They also have the added advantage of low immunogenicity. A retroviral vector may also be, e.g., a gammaretroviral vector. A gammaretroviral vector may include, e.g., a promoter, a packaging signal (W), a primer binding site (PBS), one or more (e.g., two) long terminal repeats (LTR), and a transgene of interest, e.g., a gene encoding a CAR. A gammaretroviral vector may lack viral structural gens such as gag, pol, and env. Exemplary gammaretroviral vectors include Murine Leukemia Virus (MLV), Spleen-Focus Forming Virus (SFFV), and Myeloproliferative Sarcoma Virus (MPSV), and vectors derived therefrom. Other gammaretroviral vectors are described, e.g., in Tobias Maetzig et al., “Gammaretroviral Vectors: Biology, Technology and Application” Viruses. 2011 June; 3(6): 677-713.

[0703] In another embodiment, the vector comprising the nucleic acid encoding the desired CAR of the invention is an adenoviral vector (A5/35). In another embodiment, the expression of nucleic acids encoding CARs can be accomplished using of transposons such as sleeping beauty, crispr, CAS9, and zinc finger nucleases. See below June et al. 2009 Nature Reviews Immunology 9.10: 704-716, is incorporated herein by reference.

[0704] A vector may also include, e.g., a signal sequence to facilitate secretion, a polyadenylation signal and transcription terminator (e.g., from Bovine Growth Hormone (BGH) gene), an element allowing episomal replication and replication in prokaryotes (e.g. SV40 origin and ColE1 or others known in the art) and/or elements to allow selection (e.g., ampicillin resistance gene and/or zeocin marker).

[0705] In brief summary, the expression of natural or synthetic nucleic acids encoding CARs is typically achieved by operably linking a nucleic acid encoding the CAR polypeptide or portions thereof to a promoter, and incorporating the construct into an expression vector. The vectors can be suitable for replication and integration eukaryotes. Typical cloning vectors contain transcription and translation terminators, initiation sequences, and promoters useful for regulation of the expression of the desired nucleic acid sequence.

[0706] In some aspects, the expression constructs of the present invention may also be used for nucleic acid immunization and gene therapy, using standard gene delivery protocols. Methods for gene delivery are known in the art. See, e.g., U.S. Pat. Nos. 5,399,346, 5,580,859, 5,589,466, incorporated by reference herein in their entireties. In another embodiment, the invention provides a gene therapy vector.

[0707] The nucleic acid can be cloned into a number of types of vectors. For example, the nucleic acid can be cloned into a vector including, but not limited to a plasmid, a phagemid, a phage derivative, an animal virus, and a cosmid. Vectors of particular interest include expression vectors, replication vectors, probe generation vectors, and sequencing vectors.

[0708] Further, the expression vector may be provided to a cell in the form of a viral vector. Viral vector technology is well known in the art and is described, for example, in Sambrook et al., 2012, MOLECULAR CLONING: A LABORATORY MANUAL, volumes 1-4, Cold Spring Harbor Press, NY), and in other virology and molecular biology manuals. Viruses, which are useful as vectors include, but are not limited to, retroviruses, adenoviruses, adeno-associated viruses, herpes viruses, and lentiviruses. In general, a suitable vector contains an origin of replication functional in at least one organism, a promoter sequence, convenient restriction endonuclease sites, and one or more selectable markers, (e.g., WO 01/96584; WO 01/29058; and U.S. Pat. No. 6,326,193).

[0709] A number of viral based systems have been developed for gene transfer into mammalian cells. For example, retroviruses provide a convenient platform for gene delivery systems. A selected gene can be inserted into a vector and packaged in retroviral particles using techniques known in the art. The recombinant virus can then be isolated and delivered to cells of the subject either in vivo or ex vivo. A number of retroviral systems are known in the art. In some embodiments, adenovirus vectors are used. A number of adenovirus vectors are known in the art. In one embodiment, lentivirus vectors are used.

[0710] Additional promoter elements, e.g., enhancers, regulate the frequency of transcriptional initiation. Typically, these are located in the region 30-110 bp upstream of the start site, although a number of promoters have been shown to contain functional elements downstream of the start site as well. The spacing between promoter elements frequently is flexible, so that promoter function is preserved when elements are inverted or moved relative to one another. In the thymidine kinase (tk) promoter, the spacing between promoter elements can be increased to 50 bp apart before activity begins to decline. Depending on the promoter, it appears that individual elements can function either cooperatively or independently to activate transcription. Exemplary promoters include the CMV IE gene, EF-la, ubiquitin C, or phosphoglycerokinase (PGK) promoters. In an embodiment, the promoter is a PGK promoter, e.g., a truncated PGK promoter as described herein.

[0711] An example of a promoter that is capable of expressing a CAR transgene in a mammalian T cell is the EF1a promoter. The native EF1a promoter drives expression of the alpha subunit of the elongation factor-1 complex, which is responsible for the enzymatic delivery of aminoacyl tRNAs to the ribosome. The EF1a promoter has been extensively used in mammalian expression plasmids and has been shown to be effective in driving CAR expression from transgenes cloned into a lentiviral vector. See, e.g., Milone et al., Mol. Ther. 17(8): 1453-1464 (2009). In one aspect, the EF1a promoter comprises the sequence provided as SEQ ID NO:100.

[0712] Another example of a promoter is the immediate early cytomegalovirus (CMV) promoter sequence. This promoter sequence is a strong constitutive promoter sequence capable of driving high levels of expression of any polynucleotide sequence operatively linked thereto. However, other constitutive promoter sequences may also be used, including, but not limited to the simian virus 40 (SV40) early promoter, mouse mammary tumor virus (MMTV), human immunodeficiency virus (HIV) long terminal repeat (LTR) promoter, MoMuLV promoter, an avian leukemia virus promoter, an Epstein-Barr virus immediate early promoter, a Rous sarcoma virus promoter, as well as human gene promoters such as, but not limited to, the actin promoter, the myosin promoter, the elongation factor-la promoter, the hemoglobin promoter, and the creatine kinase promoter. Further, the invention should not be limited to the use of constitutive promoters. Inducible promoters are also contemplated as part of the invention. The use of an inducible promoter provides a molecular switch capable of turning on expression of the polynucleotide sequence which it is operatively linked when such expression is desired, or turning off the expression when expression is not desired. Examples of inducible promoters include, but are not limited to a metallothionine promoter, a glucocorticoid promoter, a progesterone promoter, and a tetracycline promoter.

[0713] Another example of a promoter is the phosphoglycerate kinase (PGK) promoter. In embodiments, a truncated PGK promoter (e.g., a PGK promoter with one or more, e.g., 1, 2, 5, 10, 100, 200, 300, or 400, nucleotide deletions when compared to the wild-type PGK promoter sequence) may be desired. The nucleotide sequences of exemplary PGK promoters are provided below.

[0714] WT PGK Promoter:

(SEQ ID NO: 1323)
ACCCCTCTCTCCAGCCACTAAGCCAGTTGCTCCCTCGGCTGACGGCTGCA
CGCGAGGCCTCCGAACGTCTTACGCCTTGTGGCGCGCCCGTCCTTGTCCC
GGGTGTGATGGCGGGGTGTGGGGCGGAGGGCGTGGCGGGGAAGGGCCGGC
GACGAGAGCCGCGCGGGACGACTCGTCGGCGATAACCGGTGTCGGGTAGC
GCCAGCCGCGCGACGGTAACGAGGGACCGCGACAGGCAGACGCTCCCATG
ATCACTCTGCACGCCGAAGGCAAATAGTGCAGGCCGTGCGGCGCTTGGCG
TTCCTTGGAAGGGCTGAATCCCCGCCTCGTCCTTCGCAGCGGCCCCCCGG
GTGTTCCCATCGCCGCTTCTAGGCCCACTGCGACGCTTGCCTGCACTTCT
TACACGCTCTGGGTCCCAGCCGCGGCGACGCAAAGGGCCTTGGTGCGGGT
CTCGTCGGCGCAGGGACGCGTTTGGGTCCCGACGGAACCTTTTCCGCGTT
GGGGTTGGGGCACCATAAGCT

[0715] Exemplary Truncated PGK Promoters:

PGK100:
(SEQ ID NO: 1324)
ACCCCTCTCTCCAGCCACTAAGCCAGTTGCTCCCTCGGCTGACGGCTGCA
CGCGAGGCCTCCGAACGTCTTACGCCTTGTGGCGCGCCCGTCCTTGTCCC
GGGTGTGATGGCGGGGTG
PGK200:
(SEQ ID NO: 1325)
ACCCCTCTCTCCAGCCACTAAGCCAGTTGCTCCCTCGGCTGACGGCTGCA
CGCGAGGCCTCCGAACGTCTTACGCCTTGTGGCGCGCCCGTCCTTGTCCC
GGGTGTGATGGCGGGGTGTGGGGCGGAGGGCGTGGCGGGGAAGGGCCGGC
GACGAGAGCCGCGCGGGACGACTCGTCGGCGATAACCGGTGTCGGGTAGC
GCCAGCCGCGCGACGGTAACG
PGK300:
(SEQ ID NO: 1326)
ACCCCTCTCTCCAGCCACTAAGCCAGTTGCTCCCTCGGCTGACGGCTGCA
CGCGAGGCCTCCGAACGTCTTACGCCTTGTGGCGCGCCCGTCCTTGTCCC
GGGTGTGATGGCGGGGTGTGGGGCGGAGGGCGTGGCGGGGAAGGGCCGGC
GACGAGAGCCGCGCGGGACGACTCGTCGGCGATAACCGGTGTCGGGTAGC
GCCAGCCGCGCGACGGTAACGAGGGACCGCGACAGGCAGACGCTCCCATG
ATCACTCTGCACGCCGAAGGCAAATAGTGCAGGCCGTGCGGCGCTTGGCG
TTCCTTGGAAGGGCTGAATCCCCG
PGK400:
(SEQ ID NO: 1327)
ACCCCTCTCTCCAGCCACTAAGCCAGTTGCTCCCTCGGCTGACGGCTGCA
CGCGAGGCCTCCGAACGTCTTACGCCTTGTGGCGCGCCCGTCCTTGTCCC
GGGTGTGATGGCGGGGTGTGGGGCGGAGGGCGTGGCGGGGAAGGGCCGGC
GACGAGAGCCGCGCGGGACGACTCGTCGGCGATAACCGGTGTCGGGTAGC
GCCAGCCGCGCGACGGTAACGAGGGACCGCGACAGGCAGACGCTCCCATG
ATCACTCTGCACGCCGAAGGCAAATAGTGCAGGCCGTGCGGCGCTTGGCG
TTCCTTGGAAGGGCTGAATCCCCGCCTCGTCCTTCGCAGCGGCCCCCCGG
GTGTTCCCATCGCCGCTTCTAGGCCCACTGCGACGCTTGCCTGCACTTCT
TACACGCTCTGGGTCCCAGCCG

[0716] A vector may also include, e.g., a signal sequence to facilitate secretion, a polyadenylation signal and transcription terminator (e.g., from Bovine Growth Hormone (BGH) gene), an element allowing episomal replication and replication in prokaryotes (e.g. SV40 origin and ColE1 or others known in the art) and/or elements to allow selection (e.g., ampicillin resistance gene and/or zeocin marker).

[0717] In order to assess the expression of a CAR polypeptide or portions thereof, the expression vector to be introduced into a cell can also contain either a selectable marker gene or a reporter gene or both to facilitate identification and selection of expressing cells from the population of cells sought to be transfected or infected through viral vectors. In other aspects, the selectable marker may be carried on a separate piece of DNA and used in a co-transfection procedure. Both selectable markers and reporter genes may be flanked with appropriate regulatory sequences to enable expression in the host cells. Useful selectable markers include, for example, antibiotic-resistance genes, such as neo and the like.

[0718] Reporter genes are used for identifying potentially transfected cells and for evaluating the functionality of regulatory sequences. In general, a reporter gene is a gene that is not present in or expressed by the recipient organism or tissue and that encodes a polypeptide whose expression is manifested by some easily detectable property, e.g., enzymatic activity. Expression of the reporter gene is assayed at a suitable time after the DNA has been introduced into the recipient cells. Suitable reporter genes may include genes encoding luciferase, beta-galactosidase, chloramphenicol acetyl transferase, secreted alkaline phosphatase, or the green fluorescent protein gene (e.g., Ui-Tei et al., 2000 FEBS Letters 479: 79-82). Suitable expression systems are well known and may be prepared using known techniques or obtained commercially. In general, the construct with the minimal 5′ flanking region showing the highest level of expression of reporter gene is identified as the promoter. Such promoter regions may be linked to a reporter gene and used to evaluate agents for the ability to modulate promoter-driven transcription.

[0719] In embodiments, the vector may comprise two or more nucleic acid sequences encoding a CAR, e.g., a first CAR that binds to CD19 and a second CAR, e.g., an inhibitory CAR or a CAR that specifically binds to a second antigen, e.g., CD10, CD20, CD22, CD34, CD123, FLT-3, ROR1, CD79b, CD179b, or CD79a. In such embodiments, the two or more nucleic acid sequences encoding the CAR are encoded by a single nucleic molecule in the same frame and as a single polypeptide chain. In this aspect, the two or more CARs, can, e.g., be separated by one or more peptide cleavage sites. (e.g., an auto-cleavage site or a substrate for an intracellular protease). Examples of peptide cleavage sites include the following, wherein the GSG residues are optional:

T2A:
(SEQ ID NO: 1328)
(GSG)EGRGSLLTCGDVEENPGP
P2A:
(SEQ ID NO: 1329)
(GSG)ATNFSLLKQAGDVEENPGP
E2A:
(SEQ ID NO: 1330)
(GSG)QCTNYALLKLAGDVESNPGP
F2A:
(SEQ ID NO: 1331)
(GSG)VKQTLNFDLLKLAGDVESNPGP

[0720] Methods of introducing and expressing genes into a cell are known in the art. In the context of an expression vector, the vector can be readily introduced into a host cell, e.g., mammalian, bacterial, yeast, or insect cell by any method in the art. For example, the expression vector can be transferred into a host cell by physical, chemical, or biological means.

[0721] Physical methods for introducing a polynucleotide into a host cell include calcium phosphate precipitation, lipofection, particle bombardment, microinjection, electroporation, and the like. Methods for producing cells comprising vectors and/or exogenous nucleic acids are well-known in the art. See, for example, Sambrook et al., 2012, MOLECULAR CLONING: A LABORATORY MANUAL, volumes 1-4, Cold Spring Harbor Press, NY). A suitable method for the introduction of a polynucleotide into a host cell is calcium phosphate transfection

[0722] Biological methods for introducing a polynucleotide of interest into a host cell include the use of DNA and RNA vectors. Viral vectors, and especially retroviral vectors, have become the most widely used method for inserting genes into mammalian, e.g., human cells. Other viral vectors can be derived from lentivirus, poxviruses, herpes simplex virus I, adenoviruses and adeno-associated viruses, and the like. See, for example, U.S. Pat. Nos. 5,350,674 and 5,585,362.

[0723] Chemical means for introducing a polynucleotide into a host cell include colloidal dispersion systems, such as macromolecule complexes, nanocapsules, microspheres, beads, and lipid-based systems including oil-in-water emulsions, micelles, mixed micelles, and liposomes. An exemplary colloidal system for use as a delivery vehicle in vitro and in vivo is a liposome (e.g., an artificial membrane vesicle). Other methods of state-of-the-art targeted delivery of nucleic acids are available, such as delivery of polynucleotides with targeted nanoparticles or other suitable sub-micron sized delivery system.

[0724] In the case where a non-viral delivery system is utilized, an exemplary delivery vehicle is a liposome. The use of lipid formulations is contemplated for the introduction of the nucleic acids into a host cell (in vitro, ex vivo or in vivo). In another aspect, the nucleic acid may be associated with a lipid. The nucleic acid associated with a lipid may be encapsulated in the aqueous interior of a liposome, interspersed within the lipid bilayer of a liposome, attached to a liposome via a linking molecule that is associated with both the liposome and the oligonucleotide, entrapped in a liposome, complexed with a liposome, dispersed in a solution containing a lipid, mixed with a lipid, combined with a lipid, contained as a suspension in a lipid, contained or complexed with a micelle, or otherwise associated with a lipid. Lipid, lipid/DNA or lipid/expression vector associated compositions are not limited to any particular structure in solution. For example, they may be present in a bilayer structure, as micelles, or with a “collapsed” structure. They may also simply be interspersed in a solution, possibly forming aggregates that are not uniform in size or shape. Lipids are fatty substances which may be naturally occurring or synthetic lipids. For example, lipids include the fatty droplets that naturally occur in the cytoplasm as well as the class of compounds which contain long-chain aliphatic hydrocarbons and their derivatives, such as fatty acids, alcohols, amines, amino alcohols, and aldehydes.

[0725] Lipids suitable for use can be obtained from commercial sources. For example, dimyristyl phosphatidylcholine (“DMPC”) can be obtained from Sigma, St. Louis, Mo.; dicetyl phosphate (“DCP”) can be obtained from K & K Laboratories (Plainview, N.Y.); cholesterol (“Choi”) can be obtained from Calbiochem-Behring; dimyristyl phosphatidylglycerol (“DMPG”) and other lipids may be obtained from Avanti Polar Lipids, Inc. (Birmingham, Ala.). Stock solutions of lipids in chloroform or chloroform/methanol can be stored at about −20° C. Chloroform is used as the only solvent since it is more readily evaporated than methanol. “Liposome” is a generic term encompassing a variety of single and multilamellar lipid vehicles formed by the generation of enclosed lipid bilayers or aggregates. Liposomes can be characterized as having vesicular structures with a phospholipid bilayer membrane and an inner aqueous medium. Multilamellar liposomes have multiple lipid layers separated by aqueous medium. They form spontaneously when phospholipids are suspended in an excess of aqueous solution. The lipid components undergo self-rearrangement before the formation of closed structures and entrap water and dissolved solutes between the lipid bilayers (Ghosh et al., 1991 Glycobiology 5: 505-10). However, compositions that have different structures in solution than the normal vesicular structure are also encompassed. For example, the lipids may assume a micellar structure or merely exist as nonuniform aggregates of lipid molecules. Also contemplated are lipofectamine-nucleic acid complexes.

[0726] Regardless of the method used to introduce exogenous nucleic acids into a host cell or otherwise expose a cell to the inhibitor of the present invention, in order to confirm the presence of the recombinant DNA sequence in the host cell, a variety of assays may be performed. Such assays include, for example, “molecular biological” assays well known to those of skill in the art, such as Southern and Northern blotting, RT-PCR and PCR; “biochemical” assays, such as detecting the presence or absence of a particular peptide, e.g., by immunological means (ELISAs and Western blots) or by assays described herein to identify agents falling within the scope of the invention.

[0727] The present invention further provides a vector comprising a CAR encoding nucleic acid molecule. In one aspect, a CAR vector can be directly transduced into a cell, e.g., a T cell. In one aspect, the vector is a cloning or expression vector, e.g., a vector including, but not limited to, one or more plasmids (e.g., expression plasmids, cloning vectors, minicircles, minivectors, double minute chromosomes), retroviral and lentiviral vector constructs. In one aspect, the vector is capable of expressing the CAR construct in mammalian T cells. In one aspect, the mammalian T cell is a human T cell.

### Immune Effector Cells Expressing a CAR

[0728] In another aspect, the present invention provides a population of CAR-expressing cells. In some embodiments, the population of CAR-expressing cells comprises a cell that expresses one or more CARs described herein. In some embodiments, the population of CAR-expressing cells comprises a mixture of cells expressing different CARs.

[0729] For example, in one embodiment, the population of CART cells can include a first cell expressing a CAR having an antigen binding domain to a tumor antigen described herein, e.g., CD19, and a second cell expressing a CAR having a different antigen binding domain, e.g., an antigen binding domain to a different tumor antigen described herein, e.g., an antigen binding domain to a tumor antigen described herein that differs from the tumor antigen bound by the antigen binding domain of the CAR expressed by the first cell, e.g., CD10, CD20, CD22, CD34, CD123, FLT-3, ROR1, CD79b, CD179b, or CD79a.

[0730] As another example, the population of CAR-expressing cells can include a first cell expressing a CAR that includes an antigen binding domain to a tumor antigen described herein, and a second cell expressing a CAR that includes an antigen binding domain to a target other than a tumor antigen as described herein. In one embodiment, the population of CAR-expressing cells includes, e.g., a first cell expressing a CAR that includes a primary intracellular signaling domain, and a second cell expressing a CAR that includes a secondary signaling domain. Either one or both of the CAR expressing cells can have a truncated PGK promoter, e.g., as described herein, operably linked to the nucleic acid encoding the CAR.

[0731] In another aspect, the present invention provides a population of cells wherein at least one cell in the population expresses a CAR having an antigen binding domain to a tumor antigen described herein, and a second cell expressing another agent, e.g., an agent which enhances the activity of a CAR-expressing cell. The CAR expressing cells of the population can have a truncated PGK promoter, e.g., as described herein, operably linked to the nucleic acid encoding the CAR. In one embodiment, the agent can be an agent which inhibits an inhibitory molecule. Inhibitory molecules, e.g., PD-1, can, in some embodiments, decrease the ability of a CAR-expressing cell to mount an immune effector response. Examples of inhibitory molecules include PD-1, PD-L1, PD-L2, CTLA4, TIM3, CEACAM (CEACAM-1, CEACAM-3, and/or CEACAM-5), LAG3, VISTA, BTLA, TIGIT, LAIR1, CD160, 2B4, CD80, CD86, B7-H3 (CD276), B7-H4 (VTCN1), HVEM (TNFRSF14 or CD270), KIR, A2aR, MHC class I, MHC class II, GAL9, adenosine, and TGF (e.g., TGF beta). In one embodiment, the agent which inhibits an inhibitory molecule comprises a first polypeptide, e.g., an inhibitory molecule, associated with a second polypeptide that provides a positive signal to the cell, e.g., an intracellular signaling domain described herein. In one embodiment, the agent comprises a first polypeptide, e.g., of an inhibitory molecule such as PD1, PD-L1, CTLA4, TIM3, CEACAM (e.g., CEACAM-1, CEACAM-3, and/or CEACAM-5), LAG3, VISTA, BTLA, TIGIT, LAIR1, CD160, 2B4 or TGF beta, or a fragment of any of these, and a second polypeptide which is an intracellular signaling domain described herein (e.g., comprising a costimulatory domain (e.g., 41BB, CD27, OX40 or CD28, e.g., as described herein) and/or a primary signaling domain (e.g., a CD3 zeta signaling domain described herein). In one embodiment, the agent comprises a first polypeptide of PD-1 or a fragment thereof, and a second polypeptide of an intracellular signaling domain described herein (e.g., a CD28 signaling domain described herein and/or a CD3 zeta signaling domain described herein).

Co-expression of CAR with Other Molecules or Agents

[0732] Co-expression of a Second CAR

[0733] In one aspect, the CAR-expressing cell described herein can further comprise a second CAR, e.g., a second CAR that includes a different antigen binding domain, e.g., to the same target (CD19) or a different target (e.g., CD10, CD20, CD22, CD34, CD123, FLT-3, ROR1, CD79b, CD179b, or CD79a). In one embodiment, the second CAR includes an antigen binding domain to a target expressed on acute myeloid leukemia cells, such as, e.g., CD20, CD22, ROR1, CD10, CD33, CLL-1, CD34, CD123, FLT3, CD79b, CD179b, and CD79a. In one embodiment, the CAR-expressing cell comprises a first CAR that targets a first antigen and includes an intracellular signaling domain having a costimulatory signaling domain but not a primary signaling domain, and a second CAR that targets a second, different, antigen and includes an intracellular signaling domain having a primary signaling domain but not a costimulatory signaling domain. While not wishing to be bound by theory, placement of a costimulatory signaling domain, e.g., 4-1BB, CD28, CD27 or OX-40, onto the first CAR, and the primary signaling domain, e.g., CD3 zeta, on the second CAR can limit the CAR activity to cells where both targets are expressed. In one embodiment, the CAR expressing cell comprises a first CD19 CAR that includes a CD19 binding domain, a transmembrane domain and a costimulatory domain and a second CAR that targets an antigen other than CD19 (e.g., an antigen expressed on AML cells, e.g., CD22, CD20, ROR1, CD10, CD33, CLL-1, CD34, CD123, FLT3, CD79b, CD179b, or CD79a) and includes an antigen binding domain, a transmembrane domain and a primary signaling domain. In another embodiment, the CAR expressing cell comprises a first CD19 CAR that includes a CD19 binding domain, a transmembrane domain and a primary signaling domain and a second CAR that targets an antigen other than CD19 (e.g., an antigen expressed on AML cells, e.g., CD22, CD20, ROR1, CD10, CD33, CD123, CLL-1, CD34, FLT3, CD79b, CD179b, or CD79a) and includes an antigen binding domain to the antigen, a transmembrane domain and a costimulatory signaling domain.

[0734] In one aspect, the CAR-expressing cell described herein can further comprise a second CAR, e.g., a second CAR that includes a different antigen binding domain, e.g., to the same target (e.g., CD19) or a different target (e.g., a target other than CD19, e.g., CD10, CD20, CD22, CD34, CD123, FLT-3, ROR1, CD79b, CD179b, or CD79a). In one embodiment, the CAR-expressing cell comprises a first CAR that targets a first antigen and includes an intracellular signaling domain having a costimulatory signaling domain but not a primary signaling domain, and a second CAR that targets a second, different, antigen and includes an intracellular signaling domain having a primary signaling domain but not a costimulatory signaling domain. Placement of a costimulatory signaling domain, e.g., 4-1BB, CD28, CD27, OX-40 or ICOS, onto the first CAR, and the primary signaling domain, e.g., CD3 zeta, on the second CAR can limit the CAR activity to cells where both targets are expressed. In one embodiment, the CAR expressing cell comprises a first CAR that includes an antigen binding domain, a transmembrane domain and a costimulatory domain and a second CAR that targets another antigen and includes an antigen binding domain, a transmembrane domain and a primary signaling domain. In another embodiment, the CAR expressing cell comprises a first CAR that includes an antigen binding domain, a transmembrane domain and a primary signaling domain and a second CAR that targets another antigen and includes an antigen binding domain to the antigen, a transmembrane domain and a costimulatory signaling domain.

[0735] In one embodiment, the CAR-expressing cell comprises an XCAR described herein (e.g., CD19 CAR, CD20 CAR, or CD22 CAR) and an inhibitory CAR. In one embodiment, the CAR-expressing cell comprises a CD19 CAR described herein and an inhibitory CAR. In one embodiment, the inhibitory CAR comprises an antigen binding domain that binds an antigen found on normal cells but not cancer cells, e.g., normal cells that also express CD19. In one embodiment, the inhibitory CAR comprises the antigen binding domain, a transmembrane domain and an intracellular domain of an inhibitory molecule. For example, the intracellular domain of the inhibitory CAR can be an intracellular domain PD-1, PD-L1, PD-L2, CTLA4, TIM3, CEACAM (CEACAM-1, CEACAM-3, and/or CEACAM-5), LAG3, VISTA, BTLA, TIGIT, LAIR1, CD160, 2B4, CD80, CD86, B7-H3 (CD276), B7-H4 (VTCN1), HVEM (TNFRSF14 or CD270), KIR, A2aR, MHC class I, MHC class II, GAL9, adenosine, and TGF (e.g., TGF beta).

[0736] In one embodiment, when the CAR-expressing cell comprises two or more different CARs, the antigen binding domains of the different CARs can be such that the antigen binding domains do not interact with one another. For example, a cell expressing a first and second CAR can have an antigen binding domain of the first CAR, e.g., as a fragment, e.g., an scFv, that does not form an association with the antigen binding domain of the second CAR, e.g., the antigen binding domain of the second CAR is a VHH.

Co-Expression of an Agent that Enhances CAR Activity

[0737] In another aspect, the CAR-expressing cell described herein can further express another agent, e.g., an agent that enhances the activity or fitness of a CAR-expressing cell.

[0738] For example, in one embodiment, the agent can be an agent which inhibits a molecule that modulates or regulates, e.g., inhibits, T cell function. In some embodiments, the molecule that modulates or regulates T cell function is an inhibitory molecule. Inhibitory molecules, e.g., PD1, can, in some embodiments, decrease the ability of a CAR-expressing cell to mount an immune effector response. Examples of inhibitory molecules include PD1, PD-L1, PD-L2, CTLA4, TIM3, CEACAM (e.g., CEACAM-1, CEACAM-3 and/or CEACAM-5), LAG3, VISTA, BTLA, TIGIT, LAIR1, CD160, 2B4, CD160, 2B4, CD80, CD86, B7-H3 (CD276), B7-H4 (VTCN1), HVEM (TNFRSF14 or CD270), KIR, A2aR, MHC class I, MHC class II, GAL9, adenosine, and TGF (e.g., TGF beta).

[0739] In one embodiment, an inhibitory nucleic acid, e.g., an inhibitory nucleic acid, e.g., a dsRNA, e.g., an siRNA or shRNA, a clustered regularly interspaced short palindromic repeats (CRISPR), a transcription-activator like effector nuclease (TALEN), or a zinc finger endonuclease (ZFN), e.g., as described herein, can be used to inhibit expression of a molecule that modulates or regulates, e.g., inhibits, T-cell function in the CAR-expressing cell. In an embodiment the agent is an shRNA, e.g., an shRNA described herein. In an embodiment, the agent that modulates or regulates, e.g., inhibits, T-cell function is inhibited within a CAR-expressing cell. For example, a dsRNA molecule that inhibits expression of a molecule that modulates or regulates, e.g., inhibits, T-cell function is linked to the nucleic acid that encodes a component, e.g., all of the components, of the CAR.

[0740] In one embodiment, the agent which inhibits an inhibitory molecule comprises a first polypeptide, e.g., an inhibitory molecule, associated with a second polypeptide that provides a positive signal to the cell, e.g., an intracellular signaling domain described herein. In one embodiment, the agent comprises a first polypeptide, e.g., of an inhibitory molecule such as PD1, PD-L1, PD-L2, CTLA4, TIM3, CEACAM (e.g., CEACAM-1, CEACAM-3 and/or CEACAM-5), LAG3, VISTA, BTLA, TIGIT, LAIR1, CD160, 2B4, CD160, 2B4, CD80, CD86, B7-H3 (CD276), B7-H4 (VTCN1), HVEM (TNFRSF14 or CD270), KIR, A2aR, MHC class I, MHC class II, GAL9, adenosine, or TGF (e.g., TGF beta), or a fragment of any of these (e.g., at least a portion of an extracellular domain of any of these), and a second polypeptide which is an intracellular signaling domain described herein (e.g., comprising a costimulatory domain (e.g., 41BB, CD27 or CD28, e.g., as described herein) and/or a primary signaling domain (e.g., a CD3 zeta signaling domain described herein). In one embodiment, the agent comprises a first polypeptide of PD1 or a fragment thereof (e.g., at least a portion of an extracellular domain of PD1), and a second polypeptide of an intracellular signaling domain described herein (e.g., a CD28 signaling domain described herein and/or a CD3 zeta signaling domain described herein). PD1 is an inhibitory member of the CD28 family of receptors that also includes CD28, CTLA-4, ICOS, and BTLA. PD-1 is expressed on activated B cells, T cells and myeloid cells (Agata et al. 1996 Int. Immunol 8:765-75). Two ligands for PD1, PD-L1 and PD-L2 have been shown to downregulate T cell activation upon binding to PD1 (Freeman et a. 2000 J Exp Med 192:1027-34; Latchman et al. 2001 Nat Immunol 2:261-8; Carter et al. 2002 Eur J Immunol 32:634-43). PD-L1 is abundant in human cancers (Dong et al. 2003 J Mol Med 81:281-7; Blank et al. 2005 Cancer Immunol. Immunother 54:307-314; Konishi et al. 2004 Clin Cancer Res 10:5094). Immune suppression can be reversed by inhibiting the local interaction of PD1 with PD-L1.

[0741] In one embodiment, the agent comprises the extracellular domain (ECD) of an inhibitory molecule, e.g., Programmed Death 1 (PD1), can be fused to a transmembrane domain and intracellular signaling domains such as 41BB and CD3 zeta (also referred to herein as a PD1 CAR). In one embodiment, the PD1 CAR, when used in combinations with a CD19 CAR described herein, improves the persistence of the T cell. In one embodiment, the CAR is a PD1 CAR comprising the extracellular domain of PD1 indicated as underlined in SEQ ID NO: 121. In one embodiment, the PD1 CAR comprises the amino acid sequence of SEQ ID NO:121.

(SEQ ID NO: 121)
Malpvtalllplalllhaarppgwfldspdrpwnpptfspallvvtegd
natftcsfsntsesfvlnwyrmspsnqtdklaafpedrsqpgqdcrfrv
tqlpngrdfhmsvvrarrndsgtylcgaislapkaqikeslraelrvte
rraevptahpspsprpagqfqtlvtttpaprpptpaptiasqplslrpe
acrpaaggavhtrgldfacdiyiwaplagtcgvlllslvitlyckrgrk
kllyifkqpfmrpvqttqeedgcscrfpeeeeggcelrvkfsrsadapa
ykqgqnqlynelnlgrreeydvldkrrgrdpemggkprrknpqeglyne
lqkdkmaeayseigmkgerrrgkghdglyqglstatkdtydalhmqalp
pr.

[0742] In one embodiment, the PD1 CAR comprises the amino acid sequence provided below (SEQ ID NO:119).

(SEQ ID NO: 119)
pgwfldspdrpwnpptfspallvvtegdnatftcsfsntsesfvlnwyr
mspsnqtdklaafpedrsqpgqdcrfrvtqlpngrdfhmsvvrarrnds
gtylcgaislapkaqikeslraelrvterraevptahpspsprpagqfq
tlvtttpaprpptpaptiasqplslrpeacrpaaggavhtrgldfacdi
yiwaplagtcgvlllslvitlyckrgrkkllyifkqpfmrpvqttqeed
gcscrfpeeeeggcelrvkfsrsadapaykqgqnqlynelnlgrreeyd
vldkrrgrdpemggkprrknpqeglynelqkdkmaeayseigmkgerrr
gkghdglyqglstatkdtydalhmqalppr.

[0743] Tin one embodiment, the agent comprises a nucleic acid sequence encoding the PD1 CAR, e.g., the PD1 CAR described herein. In one embodiment, the nucleic acid sequence for the PD1 CAR is shown below, with the PD1 ECD underlined below in SEQ ID NO: 120

(SEQ ID NO: 120)
atggccctccctgtcactgccctgcttctccccctcgcactcctgctcca
cgccgctagaccacccggatggtttctggactctccggatcgcccgtgga
atcccccaaccttctcaccggcactcttggttgtgactgagggcgataat
gcgaccttcacgtgctcgttctccaacacctccgaatcattcgtgctgaa
ctggtaccgcatgagcccgtcaaaccagaccgacaagctcgccgcgtttc
cggaagatcggtcgcaaccgggacaggattgtcggttccgcgtgactcaa
ctgccgaatggcagagacttccacatgagcgtggtccgcgctaggcgaaa
cgactccgggacctacctgtgcggagccatctcgctggcgcctaaggccc
aaatcaaagagagcttgagggccgaactgagagtgaccgagcgcagagct
gaggtgccaactgcacatccatccccatcgcctcggcctgcggggcagtt
tcagaccctggtcacgaccactccggcgccgcgcccaccgactccggccc
caactatcgcgagccagcccctgtcgctgaggccggaagcatgccgccct
gccgccggaggtgctgtgcatacccggggattggacttcgcatgcgacat
ctacatttgggctcctctcgccggaacttgtggcgtgctccttctgtccc
tggtcatcaccctgtactgcaagcggggtcggaaaaagcttctgtacatt
ttcaagcagcccttcatgaggcccgtgcaaaccacccaggaggaggacgg
ttgctcctgccggttccccgaagaggaagaaggaggttgcgagctgcgcg
tgaagttctcccggagcgccgacgcccccgcctataagcagggccagaac
cagctgtacaacgaactgaacctgggacggcgggaagagtacgatgtgct
ggacaagcggcgcggccgggaccccgaaatgggcgggaagcctagaagaa
agaaccctcaggaaggcctgtataacgagctgcagaaggacaagatggcc
gaggcctactccgaaattgggatgaagggagagcggcggaggggaaaggg
gcacgacggcctgtaccaaggactgtccaccgccaccaaggacacatacg
atgccctgcacatgcaggcccttccccctcgc.

[0744] In another example, in one embodiment, the agent which enhances the activity of a CAR-expressing cell can be a costimulatory molecule or costimulatory molecule ligand. Examples of costimulatory molecules include MHC class I molecule, BTLA and a Toll ligand receptor, as well as OX40, CD27, CD28, CDS, ICAM-1, LFA-1 (CD11a/CD18), ICOS (CD278), and 4-1BB (CD137). Further examples of such costimulatory molecules include CDS, ICAM-1, GITR, BAFFR, HVEM (LIGHTR), SLAMF7, NKp80 (KLRF1), NKp44, NKp30, NKp46, CD160, CD19, CD4, CD8alpha, CD8beta, IL2R beta, IL2R gamma, IL7R alpha, ITGA4, VLA1, CD49a, ITGA4, IA4, CD49D, ITGA6, VLA-6, CD49f, ITGAD, CD11d, ITGAE, CD103, ITGAL, CD11a, LFA-1, ITGAM, CD11b, ITGAX, CD11c, ITGB1, CD29, ITGB2, CD18, LFA-1, ITGB7, NKG2D, NKG2C, TNFR2, TRANCE/RANKL, DNAM1 (CD226), SLAMF4 (CD244, 2B4), CD84, CD96 (Tactile), CEACAM1, CRTAM, Ly9 (CD229), CD160 (BY55), PSGL1, CD100 (SEMA4D), CD69, SLAMF6 (NTB-A, Ly108), SLAM (SLAMF1, CD150, IPO-3), BLAME (SLAMF8), SELPLG (CD162), LTBR, LAT, GADS, SLP-76, PAG/Cbp, CD19a, and a ligand that specifically binds with CD83., e.g., as described herein. Examples of costimulatory molecule ligands include CD80, CD86, CD40L, ICOSL, CD70, OX40L, 4-1BBL, GITRL, and LIGHT. In embodiments, the costimulatory molecule ligand is a ligand for a costimulatory molecule different from the costimulatory molecule domain of the CAR. In embodiments, the costimulatory molecule ligand is a ligand for a costimulatory molecule that is the same as the costimulatory molecule domain of the CAR. In an embodiment, the costimulatory molecule ligand is 4-1BBL. In an embodiment, the costimulatory ligand is CD80 or CD86. In an embodiment, the costimulatory molecule ligand is CD70. In embodiments, a CAR-expressing immune effector cell described herein can be further engineered to express one or more additional costimulatory molecules or costimulatory molecule ligands.

Co-Expression of CAR with a Chemokine Receptor

[0745] In embodiments, the CAR-expressing cell described herein further comprises a chemokine receptor molecule. Transgenic expression of chemokine receptors CCR2b or CXCR2 in T cells enhances trafficking to CCL2- or CXCL1-secreting solid tumors including melanoma and neuroblastoma (Craddock et al., J Immunother. 2010 October; 33(8):780-8 and Kershaw et al., Hum Gene Ther. 2002 Nov. 1; 13(16):1971-80). Thus, without wishing to be bound by theory, it is believed that chemokine receptors expressed in CAR-expressing cells that recognize chemokines secreted by tumors, e.g., solid tumors, can improve homing of the CAR-expressing cell to the tumor, facilitate the infiltration of the CAR-expressing cell to the tumor, and enhances antitumor efficacy of the CAR-expressing cell. The chemokine receptor molecule can comprise a naturally occurring or recombinant chemokine receptor or a chemokine-binding fragment thereof. A chemokine receptor molecule suitable for expression in a CAR-expressing cell described herein include a CXC chemokine receptor (e.g., CXCR1, CXCR2, CXCR3, CXCR4, CXCR5, CXCR6, or CXCR7), a CC chemokine receptor (e.g., CCR1, CCR2, CCR3, CCR4, CCR5, CCR6, CCR7, CCR8, CCR9, CCR10, or CCR11), a CX3C chemokine receptor (e.g., CX3CR1), a XC chemokine receptor (e.g., XCR1), or a chemokine-binding fragment thereof. In one embodiment, the chemokine receptor molecule to be expressed with a CAR described herein is selected based on the chemokine(s) secreted by the tumor. In one embodiment, the CAR-expressing cell described herein further comprises, e.g., expresses, a CCR2b receptor or a CXCR2 receptor. In an embodiment, the CAR described herein and the chemokine receptor molecule are on the same vector or are on two different vectors. In embodiments where the CAR described herein and the chemokine receptor molecule are on the same vector, the CAR and the chemokine receptor molecule are each under control of two different promoters or are under the control of the same promoter.

### Conditional Expression of Immune Response-Enhancing Agents

[0746] Also provided herein are compositions and methods for conditionally expressing an agent that enhances the immune response or activity of a CAR-expressing cell described herein.

[0747] In one aspect, the present disclosure features an immune effector cell that is engineered to constitutively express a CAR, also referred to herein as a nonconditional CAR. In one embodiment, a nonconditional CAR as described herein comprises an antigen binding domain that binds to a cancer associated antigen, e.g., CD19, CD10, CD20, CD22, CD34, CD123, FLT-3, or ROR1. In embodiments, the nonconditional CAR-expressing immune effector cell further comprises a conditionally-expressed agent that enhances the therapeutic efficacy, e.g., the immune response, of the CAR-expressing immune effector cell. In such embodiments, the expression of the conditionally expressed agent occurs upon activation of the nonconditional CAR-expressing immune effector cell, e.g., upon binding of the nonconditional CAR molecule to its target, e.g., a cancer associated antigen, e.g., CD19, CD10, CD20, CD22, CD34, CD123, FLT-3, or ROR1.

[0748] Immune response-enhancing agents as described herein can be characterized by one or more of the following: 1) targets or binds to a different cancer associated antigen than that targeted by the nonconditional CAR; 2) inhibits the expression or activity of an immune checkpoint or inhibitory molecule; and/or 3) activates the expression and/or secretion of a component that enhances immune response or activation of an immune effector cell. The immune response-enhancing agent can be a polypeptide or a nucleic acid, e.g., a nucleic acid that encodes a polypeptide that enhances immune response. Examples of conditionally expressed agents that enhance the immune response include, but are not limited to, an additional CAR (referred to as a conditional CAR); a TCR-based molecule (e.g., a TCR-CAR); an inhibitor of an immune checkpoint or an inhibitory molecule; and/or a cytokine. In embodiments, the conditional CAR binds to a different cancer associated antigen than that targeted by the nonconditional CAR. In embodiments, the inhibitor of an immune checkpoint or inhibitory molecule described herein is an antibody or antigen binding fragment thereof, an inhibitory nucleic acid (e.g., an siRNA or shRNA), or a small molecule that inhibits or decreases the activity of an immune checkpoint or inhibitory molecule selected from PD1, PD-L1, CTLA4, TIM3, CEACAM (e.g., CEACAM-1, CEACAM-3 and/or CEACAM-5), LAG3, VISTA, BTLA, TIGIT, LAIR1, CD160, 2B4, CD80, CD86, B7-H3 (CD276), B7-H4 (VTCN1), HVEM (TNFRSF14 or CD270), KIR, A2aR, MHC class I, MHC class II, GAL9, adenosine, or TGF beta. In embodiments, the cytokine comprises IL-2, IL-7, IL-15, or IL-21, or functional fragments or derivatives thereof.

[0749] In embodiments, the immune effector cell comprises a nonconditional CAR and one or more conditional CARs, where the conditional CAR binds to a different cancer associated antigen than that targeted by the nonconditional CAR. By way of example, in one embodiment, an immune effector cell comprises a nonconditional CAR that binds to CD19 and one or more conditional CARs that bind to CD10, CD20, CD22, CD34, CD123, FLT-3, or ROR1, or a combination thereof. In another embodiment, an immune effector cell comprises a nonconditional CAR that binds to CD10, CD20, CD22, CD34, CD123, FLT-3, or ROR1 and a conditional CAR that binds to CD19.

[0750] Conditional expression of the agent that enhances the immune response upon activation of the CAR-expressing immune effector cell is achieved by operatively linking an activation-conditional control region to the agent that enhances the immune response (e.g., to a nucleic acid sequence encoding such an agent). In one embodiment, the activation conditional control region comprises a promoter sequence that initiates expression, e.g., transcription, of the operatively linked immune response enhancing agent upon activation of the immune effector cell. In one embodiment, the activation conditional control region comprises one or more regulatory sequences (e.g., a transcription factor binding sequence or site) that facilitate the initiation of expression upon activation of the immune effector cell. In embodiments, the activation-conditional control region comprises a promoter sequence and/or one or more transcription factor binding sequences from a promoter or regulatory sequence of a gene that is upregulated upon one or more of the following: immune effector cell (e.g., T cell) activation, T-cell differentiation, T-cell polarization, or helper T cell development. Examples of such genes include, but are not limited to, NFAT (nuclear factor of activated T cells), ATF2 (activating transcription factor 2), NF-κB (nuclear factor-κB), IL-2, IL-2 receptor (IL-2R), IL-3, GM-CSF, IL-4, IL-10, and IFN-7.

[0751] In one embodiment, the activation-conditional control region comprises one or more, e.g., 1, 2, 3, 4, 5, 6, or more, NFAT binding sequences or sites. In embodiments, the NFAT-binding sequence in the promoter comprises (5′-GGAAA-3′) (SEQ ID NO: 1312), optionally situated in a longer consensus sequence of 5′ (A/T)GGAAA(A/N)(A/T/C)N 3′ (SEQ ID NO: 1313). In embodiments, the NFAT-binding sequence is a xb-like sequence such as GGGACT (SEQ ID NO: 1314). (See, Gibson et al., The Journal of Immunology, 2007, 179: 3831-3840.)

[0752] In one embodiment, the activation-conditional control region further comprises an IL-2 promoter (or a minimal IL-2 promoter), an IL-2R promoter, an ATF2 promoter, or a NF-κB promoter, or any functional fragment or derivative thereof. In one embodiment, the activation-conditional control region comprises one or more NFAT-binding sequences, e.g., 3 or 6 NFAT-binding sequences, and an IL-2 promoter, e.g., an IL-2 minimal promoter. In one embodiment, the activation-conditional control region comprises the sequence of

(SEQ ID NO: 1315)
AGCTTGGATCCAAGAGGAAAATTTGTTTCATACAGAAGGCGTTAAGAGGA
AAATTTGTTTCATACAGAAGGCGTTAAGAGGAAAATTTGTTTCATACAGA
AGGCGTTCAAGCTTGTCGAC.

### Sources of Cells

[0753] Prior to expansion and genetic modification or other modification, a source of cells, e.g., T cells or natural killer (NK) cells, can be obtained from a subject. Examples of subjects include humans, monkeys, chimpanzees, dogs, cats, mice, rats, and transgenic species thereof. T cells can be obtained from a number of sources, including peripheral blood mononuclear cells, bone marrow, lymph node tissue, cord blood, thymus tissue, tissue from a site of infection, ascites, pleural effusion, spleen tissue, and tumors.

[0754] In embodiments, immune effector cells (e.g., a population of immune effector cells), e.g., T cells, are derived from (e.g., differentiated from) a stem cell, e.g., an embryonic stem cell or a pluripotent stem cell, e.g., an induced pluripotent stem cell (iPSC). In embodiments, the cells are autologous or allogeneic. In embodiments wherein the cells are allogeneic, the cells, e.g., derived from stem cells (e.g., iPSCs), are modified to reduce their alloreactivity. For example, the cells can be modified to reduce alloreactivity, e.g., by modifying (e.g., disrupting) their T cell receptor. In embodiments, a site specific nuclease can be used to disrupt the T cell receptor, e.g., after T-cell differentiation. In other examples, cells, e.g., T cells derived from iPSCs, can be generated from virus-specific T cells, which are less likely to cause graft-versus-host disease because of their recognition of a pathogen-derived antigen. In yet other examples, alloreactivity can be reduced, e.g., minimized, by generating iPSCs from common HLA haplotypes such that they are histocompatible with matched, unrelated recipient subjects. In yet other examples, alloreactivity can be reduced, e.g., minimized, by repressing HLA expression through genetic modification. For example, T cells derived from iPSCs can be processed as described in, e.g., Themeli et al. Nat. Biotechnol. 31.10(2013):928-35, incorporated herein by reference. In some examples, immune effector cells, e.g., T cells, derived from stem cells, can be processed/generated using methods described in WO2014/165707, incorporated herein by reference.

[0755] In certain aspects of the present disclosure, immune effector cells, e.g., T cells, can be obtained from a unit of blood collected from a subject using any number of techniques known to the skilled artisan, such as Ficoll™ separation. In one aspect, cells from the circulating blood of an individual are obtained by apheresis. The apheresis product typically contains lymphocytes, including T cells, monocytes, granulocytes, B cells, other nucleated white blood cells, red blood cells, and platelets. In one aspect, the cells collected by apheresis may be washed to remove the plasma fraction and, optionally, to place the cells in an appropriate buffer or media for subsequent processing steps. In one embodiment, the cells are washed with phosphate buffered saline (PBS). In an alternative embodiment, the wash solution lacks calcium and may lack magnesium or may lack many if not all divalent cations.

[0756] Initial activation steps in the absence of calcium can lead to magnified activation. As those of ordinary skill in the art would readily appreciate a washing step may be accomplished by methods known to those in the art, such as by using a semi-automated “flow-through” centrifuge (for example, the Cobe 2991 cell processor, the Baxter CytoMate, or the Haemonetics Cell Saver 5) according to the manufacturer's instructions. After washing, the cells may be resuspended in a variety of biocompatible buffers, such as, for example, Ca-free, Mg-free PBS, PlasmaLyte A, or other saline solution with or without buffer. Alternatively, the undesirable components of the apheresis sample may be removed and the cells directly resuspended in culture media.

[0757] It is recognized that the methods of the application can utilize culture media conditions comprising 5% or less, for example 2%, human AB serum, and employ known culture media conditions and compositions, for example those described in Smith et al., “Ex vivo expansion of human T cells for adoptive immunotherapy using the novel Xeno-free CTS Immune Cell Serum Replacement” Clinical & Translational Immunology (2015) 4, e31; doi:10.1038/cti.2014.31. In one aspect, T cells are isolated from peripheral blood lymphocytes by lysing the red blood cells and depleting the monocytes, for example, by centrifugation through a PERCOLL™ gradient or by counterflow centrifugal elutriation.

[0758] The methods described herein can include, e.g., selection of a specific subpopulation of immune effector cells, e.g., T cells, that are a T regulatory cell-depleted population, CD25+ depleted cells, using, e.g., a negative selection technique, e.g., described herein. In some embodiments, the population of T regulatory depleted cells contains less than 30%, 25%, 20%, 15%, 10%, 5%, 4%, 3%, 2%, 1% of CD25+ cells.

[0759] In one embodiment, T regulatory cells, e.g., CD25+ T cells, are removed from the population using an anti-CD25 antibody, or fragment thereof, or a CD25-binding ligand, IL-2. In one embodiment, the anti-CD25 antibody, or fragment thereof, or CD25-binding ligand is conjugated to a substrate, e.g., a bead, or is otherwise coated on a substrate, e.g., a bead. In one embodiment, the anti-CD25 antibody, or fragment thereof, is conjugated to a substrate as described herein.

[0760] In one embodiment, the T regulatory cells, e.g., CD25+ T cells, are removed from the population using CD25 depletion reagent from Miltenyi™. In one embodiment, the ratio of cells to CD25 depletion reagent is 1e7 cells to 20 uL, or 1e7 cells to 15 uL, or 1e7 cells to 10 uL, or 1e7 cells to 5 uL, or 1e7 cells to 2.5 uL, or 1e7 cells to 1.25 uL. In one embodiment, e.g., for T regulatory cells, e.g., CD25+ depletion, greater than 500 million cells/ml is used. In a further aspect, a concentration of cells of 600, 700, 800, or 900 million cells/ml is used.

[0761] In one embodiment, the population of immune effector cells to be depleted includes about 6×10⁹ CD25+ T cells. In other aspects, the population of immune effector cells to be depleted include about 1×10⁹ to 1×10¹⁰ CD25+ T cell, and any integer value in between. In one embodiment, the resulting population T regulatory depleted cells has 2×10⁹ T regulatory cells, e.g., CD25+ cells, or less (e.g., 1×10⁹, 5×10⁸, 1×10⁸, 5×10⁷, 1×10⁷, or less CD25+ cells).

[0762] In one embodiment, the T regulatory cells, e.g., CD25+ cells, are removed from the population using the CliniMAC system with a depletion tubing set, such as, e.g., tubing 162-01. In one embodiment, the CliniMAC system is run on a depletion setting such as, e.g., DEPLETION2.1.

[0763] Without wishing to be bound by a particular theory, decreasing the level of negative regulators of immune cells (e.g., decreasing the number of unwanted immune cells, e.g., T_{REG} cells), in a subject prior to apheresis or during manufacturing of a CAR-expressing cell product significantly reduces the risk of subject relapse. For example, methods of depleting T_{REG} cells are known in the art. Methods of decreasing T_{REG} cells include, but are not limited to, cyclophosphamide, anti-GITR antibody (an anti-GITR antibody described herein), CD25-depletion, mTOR inhibitor, and combinations thereof.

[0764] In some embodiments, the manufacturing methods comprise reducing the number of (e.g., depleting) T_{REG} cells prior to manufacturing of the CAR-expressing cell. For example, manufacturing methods comprise contacting the sample, e.g., the apheresis sample, with an anti-GITR antibody and/or an anti-CD25 antibody (or fragment thereof, or a CD25-binding ligand), e.g., to deplete T_{REG} cells prior to manufacturing of the CAR-expressing cell (e.g., T cell, NK cell) product.

[0765] Without wishing to be bound by a particular theory, decreasing the level of negative regulators of immune cells (e.g., decreasing the number of unwanted immune cells, e.g., T_{REG} cells), in a subject prior to apheresis or during manufacturing of a CAR-expressing cell product can reduce the risk of a T_{REG} relapse. In an embodiment, a subject is pre-treated with one or more therapies that reduce TREG cells prior to collection of cells for CAR-expressing cell product manufacturing, thereby reducing the risk of subject relapse to CAR-expressing cell treatment. In an embodiment, methods of decreasing T_{REG} cells include, but are not limited to, administration to the subject of one or more of cyclophosphamide, anti-GITR antibody, CD25-depletion, or a combination thereof. In an embodiment, methods of decreasing T_{REG} cells include, but are not limited to, administration to the subject of one or more of cyclophosphamide, anti-GITR antibody, CD25-depletion, mTOR inhibitor, or a combination thereof. Administration of one or more of cyclophosphamide, anti-GITR antibody, CD25-depletion, or a combination thereof, can occur before, during or after an infusion of the CAR-expressing cell product. Administration of one or more of cyclophosphamide, anti-GITR antibody, CD25-depletion, mTOR inhibitor, or a combination thereof, can occur before, during or after an infusion of the CAR-expressing cell product.

[0766] In some embodiments, the manufacturing methods comprise reducing the number of (e.g., depleting) T_{REG} cells prior to manufacturing of the CAR-expressing cell. For example, manufacturing methods comprise contacting the sample, e.g., the apheresis sample, with an anti-GITR antibody and/or an anti-CD25 antibody (or fragment thereof, or a CD25-binding ligand), e.g., to deplete T_{REG} cells prior to manufacturing of the CAR-expressing cell (e.g., T cell, NK cell) product.

[0767] In an embodiment, a subject is pre-treated with one or more therapies that reduce T_{RE}G cells prior to collection of cells for CAR-expressing cell product manufacturing, thereby reducing the risk of subject relapse to CAR-expressing cell treatment. In an embodiment, methods of decreasing T_{REG} cells include, but are not limited to, administration to the subject of one or more of cyclophosphamide, anti-GITR antibody, CD25-depletion, or a combination thereof. Administration of one or more of cyclophosphamide, anti-GITR antibody, CD25-depletion, or a combination thereof, can occur before, during or after an infusion of the CAR-expressing cell product.

[0768] In an embodiment, a subject is pre-treated with cyclophosphamide prior to collection of cells for CAR-expressing cell product manufacturing, thereby reducing the risk of subject relapse to CAR-expressing cell treatment. In an embodiment, a subject is pre-treated with an anti-GITR antibody prior to collection of cells for CAR-expressing cell product manufacturing, thereby reducing the risk of subject relapse to CAR-expressing cell treatment.

[0769] In one embodiment, the population of cells to be removed are neither the regulatory T cells or tumor cells, but cells that otherwise negatively affect the expansion and/or function of CART cells, e.g. cells expressing CD14, CD11b, CD33, CD15, or other markers expressed by potentially immune suppressive cells. In one embodiment, such cells are envisioned to be removed concurrently with regulatory T cells and/or tumor cells, or following said depletion, or in another order.

[0770] The methods described herein can include more than one selection step, e.g., more than one depletion step. Enrichment of a T cell population by negative selection can be accomplished, e.g., with a combination of antibodies directed to surface markers unique to the negatively selected cells. One method is cell sorting and/or selection via negative magnetic immunoadherence or flow cytometry that uses a cocktail of monoclonal antibodies directed to cell surface markers present on the cells negatively selected. For example, to enrich for CD4+ cells by negative selection, a monoclonal antibody cocktail can include antibodies to CD14, CD20, CD11b, CD16, HLA-DR, and CD8.

[0771] The methods described herein can further include removing cells from the population which express a tumor antigen, e.g., a tumor antigen that does not comprise CD25, e.g., CD19, CD30, CD38, CD123, CD20, CD14 or CD11b, to thereby provide a population of T regulatory depleted, e.g., CD25+ depleted, and tumor antigen depleted cells that are suitable for expression of a CAR, e.g., a CAR described herein. In one embodiment, tumor antigen expressing cells are removed simultaneously with the T regulatory, e.g., CD25+ cells. For example, an anti-CD25 antibody, or fragment thereof, and an anti-tumor antigen antibody, or fragment thereof, can be attached to the same substrate, e.g., bead, which can be used to remove the cells or an anti-CD25 antibody, or fragment thereof, or the anti-tumor antigen antibody, or fragment thereof, can be attached to separate beads, a mixture of which can be used to remove the cells. In other embodiments, the removal of T regulatory cells, e.g., CD25+ cells, and the removal of the tumor antigen expressing cells is sequential, and can occur, e.g., in either order.

[0772] Also provided are methods that include removing cells from the population which express a check point inhibitor, e.g., a check point inhibitor described herein, e.g., one or more of PD1+ cells, LAG3+ cells, and TIM3+ cells, to thereby provide a population of T regulatory depleted, e.g., CD25+ depleted cells, and check point inhibitor depleted cells, e.g., PD1+, LAG3+ and/or TIM3+ depleted cells. Exemplary check point inhibitors include PD1, PD-L1, PD-L2, CTLA4, TIM3, CEACAM (e.g., CEACAM-1, CEACAM-3 and/or CEACAM-5), LAG3, VISTA, BTLA, TIGIT, LAIR1, CD160, 2B4, CD80, CD86, B7-H3 (CD276), B7-H4 (VTCN1), HVEM (TNFRSF14 or CD270), KIR, A2aR, MHC class I, MHC class II, GAL9, adenosine, and TGF (e.g., TGF beta), e.g., as described herein. In one embodiment, check point inhibitor expressing cells are removed simultaneously with the T regulatory, e.g., CD25+ cells. For example, an anti-CD25 antibody, or fragment thereof, and an anti-check point inhibitor antibody, or fragment thereof, can be attached to the same bead which can be used to remove the cells, or an anti-CD25 antibody, or fragment thereof, and the anti-check point inhibitor antibody, or fragment thereof, can be attached to separate beads, a mixture of which can be used to remove the cells. In other embodiments, the removal of T regulatory cells, e.g., CD25+ cells, and the removal of the check point inhibitor expressing cells is sequential, and can occur, e.g., in either order.

[0773] Methods described herein can include a positive selection step For example, T cells can be isolated by incubation with anti-CD3/anti-CD28 (e.g., 3×28)-conjugated beads, such as DYNABEADS® M-450 CD3/CD28 T, for a time period sufficient for positive selection of the desired T cells. In one aspect, the time period is about 30 minutes. In a further aspect, the time period ranges from 30 minutes to 36 hours or longer and all integer values there between. In a further aspect, the time period is at least 1, 2, 3, 4, 5, or 6 hours. In yet another aspect, the time period is 10 to 24 hours. In one aspect, the incubation time period is 24 hours. Longer incubation times may be used to isolate T cells in any situation where there are few T cells as compared to other cell types, such in isolating tumor infiltrating lymphocytes (TIL) from tumor tissue or from immunocompromised individuals. Further, use of longer incubation times can increase the efficiency of capture of CD8+ T cells. Thus, by simply shortening or lengthening the time T cells are allowed to bind to the CD3/CD28 beads and/or by increasing or decreasing the ratio of beads to T cells (as described further herein), subpopulations of T cells can be preferentially selected for or against at culture initiation or at other time points during the process. Additionally, by increasing or decreasing the ratio of anti-CD3 and/or anti-CD28 antibodies on the beads or other surface, subpopulations of T cells can be preferentially selected for or against at culture initiation or at other desired time points.

[0774] In one embodiment, a T cell population can be selected that expresses one or more of IFN-γ, TNFα, IL-17A, IL-2, IL-3, IL-4, GM-CSF, IL-10, IL-13, granzyme B, and perforin, or other appropriate molecules, e.g., other cytokines. Methods for screening for cell expression can be determined, e.g., by the methods described in PCT Publication No.: WO 2013/126712.

[0775] For isolation of a desired population of cells by positive or negative selection, the concentration of cells and surface (e.g., particles such as beads) can be varied. In certain aspects, it may be desirable to significantly decrease the volume in which beads and cells are mixed together (e.g., increase the concentration of cells), to ensure maximum contact of cells and beads. For example, in one aspect, a concentration of about 10 billion cells/ml, 9 billion/ml, 8 billion/ml, 7 billion/ml, 6 billion/ml, or 5 billion/ml is used. In one aspect, a concentration of 1 billion cells/ml is used. In one aspect, a concentration of cells from 75, 80, 85, 90, 95, or 100 million cells/ml is used. In further aspects, concentrations of 125 or 150 million cells/ml can be used.

[0776] Using high concentrations can result in increased cell yield, cell activation, and cell expansion. Further, use of high cell concentrations allows more efficient capture of cells that may weakly express target antigens of interest, such as CD28-negative T cells, or from samples where there are many tumor cells present (e.g., leukemic blood, tumor tissue, etc.). Such populations of cells may have therapeutic value and would be desirable to obtain. For example, using high concentration of cells allows more efficient selection of CD8+ T cells that normally have weaker CD28 expression.

[0777] In a related aspect, it may be desirable to use lower concentrations of cells. By significantly diluting the mixture of T cells and surface (e.g., particles such as beads), interactions between the particles and cells is minimized. This selects for cells that express high amounts of desired antigens to be bound to the particles. For example, CD4+ T cells express higher levels of CD28 and are more efficiently captured than CD8+ T cells in dilute concentrations. In one aspect, the concentration of cells used is 5×10⁶/ml. In other aspects, the concentration used can be from about 1×10⁵/ml to 1×10⁶/ml, and any integer value in between.

[0778] In other aspects, the cells may be incubated on a rotator for varying lengths of time at varying speeds at either 2-10° C. or at room temperature.

[0779] T cells for stimulation can also be frozen after a washing step. Wishing not to be bound by theory, the freeze and subsequent thaw step provides a more uniform product by removing granulocytes and to some extent monocytes in the cell population. After the washing step that removes plasma and platelets, the cells may be suspended in a freezing solution. While many freezing solutions and parameters are known in the art and will be useful in this context, one method involves using PBS containing 20% DMSO and 8% human serum albumin, or culture media containing 10% Dextran 40 and 5% Dextrose, 20% Human Serum Albumin and 7.5% DMSO, or 31.25% Plasmalyte-A, 31.25% Dextrose 5%, 0.45% NaCl, 10% Dextran 40 and 5% Dextrose, 20% Human Serum Albumin, and 7.5% DMSO or other suitable cell freezing media containing for example, Hespan and PlasmaLyte A, the cells then are frozen to −80° C. at a rate of 1° per minute and stored in the vapor phase of a liquid nitrogen storage tank. Other methods of controlled freezing may be used as well as uncontrolled freezing immediately at −20° C. or in liquid nitrogen.

[0780] In certain aspects, cryopreserved cells are thawed and washed as described herein and allowed to rest for one hour at room temperature prior to activation using the methods of the present invention.

[0781] Also contemplated in the context of the invention is the collection of blood samples or apheresis product from a subject at a time period prior to when the expanded cells as described herein might be needed. As such, the source of the cells to be expanded can be collected at any time point necessary, and desired cells, such as T cells, isolated and frozen for later use in immune effector cell therapy for any number of diseases or conditions that would benefit from immune effector cell therapy, such as those described herein. In one aspect a blood sample or an apheresis is taken from a generally healthy subject. In certain aspects, a blood sample or an apheresis is taken from a generally healthy subject who is at risk of developing a disease, but who has not yet developed a disease, and the cells of interest are isolated and frozen for later use. In certain aspects, the T cells may be expanded, frozen, and used at a later time. In certain aspects, samples are collected from a patient shortly after diagnosis of a particular disease as described herein but prior to any treatments. In a further aspect, the cells are isolated from a blood sample or an apheresis from a subject prior to any number of relevant treatment modalities, including but not limited to treatment with agents such as natalizumab, efalizumab, antiviral agents, chemotherapy, radiation, immunosuppressive agents, such as cyclosporin, azathioprine, methotrexate, mycophenolate, and FK506, antibodies, or other immunoablative agents such as CAMPATH, anti-CD3 antibodies, cytoxan, fludarabine, cyclosporin, FK506, rapamycin, mycophenolic acid, steroids, FR901228, and irradiation.

[0782] In a further aspect of the present invention, T cells are obtained from a patient directly following treatment that leaves the subject with functional T cells. In this regard, it has been observed that following certain cancer treatments, in particular treatments with drugs that damage the immune system, shortly after treatment during the period when patients would normally be recovering from the treatment, the quality of T cells obtained may be optimal or improved for their ability to expand ex vivo. Likewise, following ex vivo manipulation using the methods described herein, these cells may be in a preferred state for enhanced engraftment and in vivo expansion. Thus, it is contemplated within the context of the present invention to collect blood cells, including T cells, dendritic cells, or other cells of the hematopoietic lineage, during this recovery phase. Further, in certain aspects, mobilization (for example, mobilization with GM-CSF) and conditioning regimens can be used to create a condition in a subject wherein repopulation, recirculation, regeneration, and/or expansion of particular cell types is favored, especially during a defined window of time following therapy. Illustrative cell types include T cells, B cells, dendritic cells, and other cells of the immune system.

[0783] In one embodiment, the immune effector cells expressing a CAR molecule, e.g., a CAR molecule described herein, are obtained from a subject that has received a low, immune enhancing dose of an mTOR inhibitor. In an embodiment, the population of immune effector cells, e.g., T cells, to be engineered to express a CAR, are harvested after a sufficient time, or after sufficient dosing of the low, immune enhancing, dose of an mTOR inhibitor, such that the level of PD1 negative immune effector cells, e.g., T cells, or the ratio of PD1 negative immune effector cells, e.g., T cells/PD1 positive immune effector cells, e.g., T cells, in the subject or harvested from the subject has been, at least transiently, increased.

[0784] In other embodiments, population of immune effector cells, e.g., T cells, which have, or will be engineered to express a CAR, can be treated ex vivo by contact with an amount of an mTOR inhibitor that increases the number of PD1 negative immune effector cells, e.g., T cells or increases the ratio of PD1 negative immune effector cells, e.g., T cells/PD1 positive immune effector cells, e.g., T cells.

[0785] In one embodiment, a T cell population is diacylglycerol kinase (DGK)-deficient. DGK-deficient cells include cells that do not express DGK RNA or protein, or have reduced or inhibited DGK activity. DGK-deficient cells can be generated by genetic approaches, e.g., administering RNA-interfering agents, e.g., siRNA, shRNA, miRNA, to reduce or prevent DGK expression. Alternatively, DGK-deficient cells can be generated by treatment with DGK inhibitors described herein.

[0786] In one embodiment, a T cell population is Ikaros-deficient. Ikaros-deficient cells include cells that do not express Ikaros RNA or protein, or have reduced or inhibited Ikaros activity, Ikaros-deficient cells can be generated by genetic approaches, e.g., administering RNA-interfering agents, e.g., siRNA, shRNA, miRNA, to reduce or prevent Ikaros expression. Alternatively, Ikaros-deficient cells can be generated by treatment with Ikaros inhibitors, e.g., lenalidomide.

[0787] In embodiments, a T cell population is DGK-deficient and Ikaros-deficient, e.g., does not express DGK and Ikaros, or has reduced or inhibited DGK and Ikaros activity. Such DGK and Ikaros-deficient cells can be generated by any of the methods described herein.

[0788] In an embodiment, the NK cells are obtained from the subject. In another embodiment, the NK cells are an NK cell line, e.g., NK-92 cell line (Conkwest).

### Allogeneic CAR

[0789] In embodiments described herein, the immune effector cell can be an allogeneic immune effector cell, e.g., T cell or NK cell. For example, the cell can be an allogeneic T cell, e.g., an allogeneic T cell lacking expression of a functional T cell receptor (TCR) and/or human leukocyte antigen (HLA), e.g., HLA class I and/or HLA class II.

[0790] A T cell lacking a functional TCR can be, e.g., engineered such that it does not express any functional TCR on its surface, engineered such that it does not express one or more subunits that comprise a functional TCR (e.g., engineered such that it does not express (or exhibits reduced expression) of TCR alpha, TCR beta, TCR gamma, TCR delta, TCR epsilon, and/or TCR zeta) or engineered such that it produces very little functional TCR on its surface (e.g., engineered such that it does not express (or exhibits reduced expression) of TCR alpha, TCR beta, TCR gamma, TCR delta, TCR epsilon, and/or TCR zeta). Alternatively, the T cell can express a substantially impaired TCR, e.g., by expression of mutated or truncated forms of one or more of the subunits of the TCR. The term “substantially impaired TCR” means that this TCR will not elicit an adverse immune reaction in a host.

[0791] A T cell described herein can be, e.g., engineered such that it does not express a functional HLA on its surface. For example, a T cell described herein, can be engineered such that cell surface expression HLA, e.g., HLA class 1 and/or HLA class II, is downregulated. In some embodiments, downregulation of HLA may be accomplished by reducing or eliminating expression of beta-2 microglobulin (B2M).

[0792] In some embodiments, the T cell can lack a functional TCR and a functional HLA, e.g., HLA class I and/or HLA class II.

[0793] Modified T cells that lack expression of a functional TCR and/or HLA can be obtained by any suitable means, including a knock out or knock down of one or more subunit of TCR or HLA. For example, the T cell can include a knock down of TCR and/or HLA using siRNA, shRNA, clustered regularly interspaced short palindromic repeats (CRISPR) transcription-activator like effector nuclease (TALEN), or zinc finger endonuclease (ZFN).

[0794] In some embodiments, the allogeneic cell can be a cell which does not express or expresses at low levels an inhibitory molecule, e.g. a cell engineered by any method described herein. For example, the cell can be a cell that does not express or expresses at low levels an inhibitory molecule, e.g., that can decrease the ability of a CAR-expressing cell to mount an immune effector response. Examples of inhibitory molecules include PD1, PD-L1, PD-L2, CTLA4, TIM3, CEACAM (e.g., CEACAM-1, CEACAM-3 and/or CEACAM-5), LAG3, VISTA, BTLA, TIGIT, LAIR1, CD160, 2B4, CD80, CD86, B7-H3 (CD276), B7-H4 (VTCN1), HVEM (TNFRSF14 or CD270), KIR, A2aR, MHC class I, MHC class II, GAL9, adenosine, and TGF (e.g., TGF beta). Inhibition of an inhibitory molecule, e.g., by inhibition at the DNA, RNA or protein level, can optimize a CAR-expressing cell performance. In embodiments, an inhibitory nucleic acid, e.g., an inhibitory nucleic acid, e.g., a dsRNA, e.g., an siRNA or shRNA, a clustered regularly interspaced short palindromic repeats (CRISPR), a transcription-activator like effector nuclease (TALEN), or a zinc finger endonuclease (ZFN), e.g., as described herein, can be used.

siRNA and shRNA to inhibit TCR or HLA

[0795] In some embodiments, TCR expression and/or HLA expression can be inhibited using siRNA or shRNA that targets a nucleic acid encoding a TCR and/or HLA, and/or an inhibitory molecule described herein (e.g., PD1, PD-L1, PD-L2, CTLA4, TIM3, CEACAM (e.g., CEACAM-1, CEACAM-3 and/or CEACAM-5), LAG3, VISTA, BTLA, TIGIT, LAIR1, CD160, 2B4, CD80, CD86, B7-H3 (CD276), B7-H4 (VTCN1), HVEM (TNFRSF14 or CD270), KIR, A2aR, MHC class I, MHC class II, GAL9, adenosine, and TGF beta), in a T cell.

[0796] Expression systems for siRNA and shRNAs, and exemplary shRNAs, are described, e.g., in paragraphs 649 and 650 of International Application WO2015/142675, filed Mar. 13, 2015, which is incorporated by reference in its entirety

### CRISPR to Inhibit TCR or HLA

[0797] “CRISPR” or “CRISPR to TCR and/or HLA” or “CRISPR to inhibit TCR and/or HLA” as used herein refers to a set of clustered regularly interspaced short palindromic repeats, or a system comprising such a set of repeats. “Cas”, as used herein, refers to a CRISPR-associated protein. A “CRISPR/Cas” system refers to a system derived from CRISPR and Cas which can be used to silence or mutate a TCR and/or HLA gene, and/or an inhibitory molecule described herein (e.g., PD1, PD-L1, PD-L2, CTLA4, TIM3, CEACAM (e.g., CEACAM-1, CEACAM-3 and/or CEACAM-5), LAG3, VISTA, BTLA, TIGIT, LAIR1, CD160, 2B4, CD80, CD86, B7-H3 (CD276), B7-H4 (VTCN1), HVEM (TNFRSF14 or CD270), KIR, A2aR, MHC class I, MHC class II, GAL9, adenosine, and TGF beta).

[0798] The CRISPR/Cas system, and uses thereof, are described, e.g., in paragraphs 651-658 of International Application WO2015/142675, filed Mar. 13, 2015, which is incorporated by reference in its entirety.

TALEN to Inhibit TCR and/or HLA

[0799] “TALEN” or “TALEN to HLA and/or TCR” or “TALEN to inhibit HLA and/or TCR” refers to a transcription activator-like effector nuclease, an artificial nuclease which can be used to edit the HLA and/or TCR gene, and/or an inhibitory molecule described herein (e.g., PD1, PD-L1, PD-L2, CTLA4, TIM3, CEACAM (e.g., CEACAM-1, CEACAM-3 and/or CEACAM-5), LAG3, VISTA, BTLA, TIGIT, LAIR1, CD160, 2B4, CD80, CD86, B7-H3 (CD276), B7-H4 (VTCN1), HVEM (TNFRSF14 or CD270), KIR, A2aR, MHC class I, MHC class II, GAL9, adenosine, and TGF beta).

[0800] TALENs, TALEs, and uses thereof, are described, e.g., in paragraphs 659-665 of International Application WO2015/142675, filed Mar. 13, 2015, which is incorporated by reference in its entirety.

Zinc Finger Nuclease to Inhibit HLA and/or TCR

[0801] “ZFN” or “Zinc Finger Nuclease” or “ZFN to HLA and/or TCR” or “ZFN to inhibit HLA and/or TCR” refer to a zinc finger nuclease, an artificial nuclease which can be used to edit the HLA and/or TCR gene, and/or an inhibitory molecule described herein (e.g., PD1, PD-L1, PD-L2, CTLA4, TIM3, CEACAM (e.g., CEACAM-1, CEACAM-3 and/or CEACAM-5), LAG3, VISTA, BTLA, TIGIT, LAIR1, CD160, 2B4, CD80, CD86, B7-H3 (CD276), B7-H4 (VTCN1), HVEM (TNFRSF14 or CD270), KIR, A2aR, MHC class I, MHC class II, GAL9, adenosine, and TGF beta).

ZFNs, and uses thereof, are described, e.g., in paragraphs 666-671 of International Application WO2015/142675, filed Mar. 13, 2015, which is incorporated by reference in its entirety.

### Telomerase Expression

[0802] While not wishing to be bound by any particular theory, in some embodiments, a therapeutic T cell has short term persistence in a patient, due to shortened telomeres in the T cell; accordingly, transfection with a telomerase gene can lengthen the telomeres of the T cell and improve persistence of the T cell in the patient. See Carl June, “Adoptive T cell therapy for cancer in the clinic”, Journal of Clinical Investigation, 117:1466-1476 (2007). Thus, in an embodiment, an immune effector cell, e.g., a T cell, ectopically expresses a telomerase subunit, e.g., the catalytic subunit of telomerase, e.g., TERT, e.g., hTERT. In some aspects, this disclosure provides a method of producing a CAR-expressing cell, comprising contacting a cell with a nucleic acid encoding a telomerase subunit, e.g., the catalytic subunit of telomerase, e.g., TERT, e.g., hTERT. The cell may be contacted with the nucleic acid before, simultaneous with, or after being contacted with a construct encoding a CAR.

[0803] In one aspect, the disclosure features a method of making a population of immune effector cells (e.g., T cells or NK cells). In an embodiment, the method comprises: providing a population of immune effector cells (e.g., T cells or NK cells), contacting the population of immune effector cells with a nucleic acid encoding a CAR; and contacting the population of immune effector cells with a nucleic acid encoding a telomerase subunit, e.g., hTERT, under conditions that allow for CAR and telomerase expression.

[0804] In an embodiment, the nucleic acid encoding the telomerase subunit is DNA. In an embodiment, the nucleic acid encoding the telomerase subunit comprises a promoter capable of driving expression of the telomerase subunit.

[0805] In an embodiment, hTERT has the amino acid sequence of GenBank Protein ID AAC51724.1 (Meyerson et al., “hEST2, the Putative Human Telomerase Catalytic Subunit Gene, Is Up-Regulated in Tumor Cells and during Immortalization” Cell Volume 90, Issue 4, 22 Aug. 1997, Pages 785-795) as disclosed on pages 233-234 of International Application WO 2016/164731, filed Apr. 8, 2016, which is incorporated by reference in its entirety.

[0806] In an embodiment, the hTERT has a sequence at least 80%, 85%, 90%, 95%, 96\hat{ },97%, 98%, or 99% identical to the sequence of SEQ ID NO: 1332. In an embodiment, the hTERT has a sequence of SEQ ID NO: 1332. In an embodiment, the hTERT comprises a deletion (e.g., of no more than 5, 10, 15, 20, or 30 amino acids) at the N-terminus, the C-terminus, or both. In an embodiment, the hTERT comprises a transgenic amino acid sequence (e.g., of no more than 5, 10, 15, 20, or 30 amino acids) at the N-terminus, the C-terminus, or both.

In an embodiment, the hTERT is encoded by the nucleic acid sequence of GenBank Accession No. AF018167 (Meyerson et al., “hEST2, the Putative Human Telomerase Catalytic Subunit Gene, Is Up-Regulated in Tumor Cells and during Immortalization” Cell Volume 90, Issue 4, 22 Aug. 1997, Pages 785-795) as disclosed on pages 234-235 of International Application WO 2016/164731, filed Apr. 8, 2016, which is incorporated by reference in its entirety.

[0807] In an embodiment, the hTERT is encoded by a nucleic acid having a sequence at least 80%, 85%, 90%, 95%, 96, 97%, 98%, or 99% identical to the sequence of SEQ ID NO: 1333. In an embodiment, the hTERT is encoded by a nucleic acid of SEQ ID NO: 1333.

### Activation and Expansion of Immune Effector Cells (e.g., T Cells)

[0808] Immune effector cells such as T cells may be activated and expanded generally using methods as described, for example, in U.S. Pat. Nos. 6,352,694; 6,534,055; 6,905,680; 6,692,964; 5,858,358; 6,887,466; 6,905,681; 7,144,575; 7,067,318; 7,172,869; 7,232,566; 7,175,843; 5,883,223; 6,905,874; 6,797,514; 6,867,041; and U.S. Patent Application Publication No. 20060121005.

[0809] The procedure for ex vivo expansion of hematopoietic stem and progenitor cells is described in U.S. Pat. No. 5,199,942, incorporated herein by reference, can be applied to the cells of the present invention. Other suitable methods are known in the art, therefore the present invention is not limited to any particular method of ex vivo expansion of the cells. Briefly, ex vivo culture and expansion of T cells can comprise: (1) collecting CD34+ hematopoietic stem and progenitor cells from a mammal from peripheral blood harvest or bone marrow explants; and (2) expanding such cells ex vivo. In addition to the cellular growth factors described in U.S. Pat. No. 5,199,942, other factors such as flt3-L, IL-1, IL-3 and c-kit ligand, can be used for culturing and expansion of the cells.

[0810] Generally, a population of immune effector cells may be expanded by contact with a surface having attached thereto an agent that stimulates a CD3/TCR complex associated signal and a ligand that stimulates a costimulatory molecule on the surface of the T cells. In particular, T cell populations may be stimulated as described herein, such as by contact with an anti-CD3 antibody, or antigen-binding fragment thereof, or an anti-CD2 antibody immobilized on a surface, or by contact with a protein kinase C activator (e.g., bryostatin) in conjunction with a calcium ionophore. For co-stimulation of an accessory molecule on the surface of the T cells, a ligand that binds the accessory molecule is used. For example, a population of T cells can be contacted with an anti-CD3 antibody and an anti-CD28 antibody, under conditions appropriate for stimulating proliferation of the T cells. To stimulate proliferation of either CD4+ T cells or CD8+ T cells, an anti-CD3 antibody and an anti-CD28 antibody may be used. Examples of an anti-CD28 antibody include 9.3, B-T3, XR-CD28 (Diaclone, Besangon, France) can be used as can other methods commonly known in the art (Berg et al., Transplant Proc. 30(8):3975-3977, 1998; Haanen et al., J. Exp. Med. 190(9):13191328, 1999; Garland et al., J. Immunol Meth. 227(1-2):53-63, 1999).

[0811] In some embodiments, immune effector cells (such as PBMCs or T cells) are expanded and stimulated by contacting the cells to one or both of an anti-CD3 antibody and IL-2. In embodiments, the cells are expanded without anti-CD3 or anti-CD28 beads.

[0812] In certain aspects, the primary stimulatory signal and the costimulatory signal for the T cell may be provided by different protocols. For example, the agents providing each signal may be in solution or coupled to a surface. When coupled to a surface, the agents may be coupled to the same surface (i.e., in “cis” formation) or to separate surfaces (i.e., in “trans” formation). Alternatively, one agent may be coupled to a surface and the other agent in solution. In one aspect, the agent providing the costimulatory signal is bound to a cell surface and the agent providing the primary activation signal is in solution or coupled to a surface. In certain aspects, both agents can be in solution. In one aspect, the agents may be in soluble form, and then cross-linked to a surface, such as a cell expressing Fc receptors or an antibody or other binding agent which will bind to the agents. In this regard, see for example, U.S. Patent Application Publication Nos. 20040101519 and 20060034810 for artificial antigen presenting cells (aAPCs) that are contemplated for use in activating and expanding T cells in the present invention.

[0813] In one aspect, the two agents are immobilized on beads, either on the same bead, i.e., “cis,” or to separate beads, i.e., “trans.” By way of example, the agent providing the primary activation signal is an anti-CD3 antibody or an antigen-binding fragment thereof and the agent providing the costimulatory signal is an anti-CD28 antibody or antigen-binding fragment thereof; and both agents are co-immobilized to the same bead in equivalent molecular amounts. In one aspect, a 1:1 ratio of each antibody bound to the beads for CD4+ T cell expansion and T cell growth is used. In certain aspects, a ratio of anti CD3:CD28 antibodies bound to the beads is used such that an increase in T cell expansion is observed as compared to the expansion observed using a ratio of 1:1. In one particular aspect an increase of from about 1 to about 3 fold is observed as compared to the expansion observed using a ratio of 1:1. In one aspect, the ratio of CD3:CD28 antibody bound to the beads ranges from 100:1 to 1:100 and all integer values there between. In one aspect, more anti-CD28 antibody is bound to the particles than anti-CD3 antibody, i.e., the ratio of CD3:CD28 is less than one. In certain aspects, the ratio of anti CD28 antibody to anti CD3 antibody bound to the beads is greater than 2:1. In one particular aspect, a 1:100 CD3:CD28 ratio of antibody bound to beads is used. In one aspect, a 1:75 CD3:CD28 ratio of antibody bound to beads is used. In a further aspect, a 1:50 CD3:CD28 ratio of antibody bound to beads is used. In one aspect, a 1:30 CD3:CD28 ratio of antibody bound to beads is used. In one aspect, a 1:10 CD3:CD28 ratio of antibody bound to beads is used. In one aspect, a 1:3 CD3:CD28 ratio of antibody bound to the beads is used. In yet one aspect, a 3:1 CD3:CD28 ratio of antibody bound to the beads is used.

[0814] Ratios of particles to cells from 1:500 to 500:1 and any integer values in between may be used to stimulate T cells or other target cells. As those of ordinary skill in the art can readily appreciate, the ratio of particles to cells may depend on particle size relative to the target cell. For example, small sized beads could only bind a few cells, while larger beads could bind many. In certain aspects the ratio of cells to particles ranges from 1:100 to 100:1 and any integer values in-between and in further aspects the ratio comprises 1:9 to 9:1 and any integer values in between, can also be used to stimulate T cells. The ratio of anti-CD3- and anti-CD28-coupled particles to T cells that result in T cell stimulation can vary as noted above, however certain suitable values include 1:100, 1:50, 1:40, 1:30, 1:20, 1:10, 1:9, 1:8, 1:7, 1:6, 1:5, 1:4, 1:3, 1:2, 1:1, 2:1, 3:1, 4:1, 5:1, 6:1, 7:1, 8:1, 9:1, 10:1, and 15:1 with one suitable ratio being at least 1:1 particles per T cell. In one aspect, a ratio of particles to cells of 1:1 or less is used. In one particular aspect, a suitable particle: cell ratio is 1:5. In further aspects, the ratio of particles to cells can be varied depending on the day of stimulation. For example, in one aspect, the ratio of particles to cells is from 1:1 to 10:1 on the first day and additional particles are added to the cells every day or every other day thereafter for up to 10 days, at final ratios of from 1:1 to 1:10 (based on cell counts on the day of addition). In one particular aspect, the ratio of particles to cells is 1:1 on the first day of stimulation and adjusted to 1:5 on the third and fifth days of stimulation. In one aspect, particles are added on a daily or every other day basis to a final ratio of 1:1 on the first day, and 1:5 on the third and fifth days of stimulation. In one aspect, the ratio of particles to cells is 2:1 on the first day of stimulation and adjusted to 1:10 on the third and fifth days of stimulation. In one aspect, particles are added on a daily or every other day basis to a final ratio of 1:1 on the first day, and 1:10 on the third and fifth days of stimulation. One of skill in the art will appreciate that a variety of other ratios may be suitable for use in the present invention. In particular, ratios will vary depending on particle size and on cell size and type. In one aspect, the most typical ratios for use are in the neighborhood of 1:1, 2:1 and 3:1 on the first day.

[0815] In further aspects of the present invention, the cells, such as T cells, are combined with agent-coated beads, the beads and the cells are subsequently separated, and then the cells are cultured. In an alternative aspect, prior to culture, the agent-coated beads and cells are not separated but are cultured together. In a further aspect, the beads and cells are first concentrated by application of a force, such as a magnetic force, resulting in increased ligation of cell surface markers, thereby inducing cell stimulation.

[0816] By way of example, cell surface proteins may be ligated by allowing paramagnetic beads to which anti-CD3 and anti-CD28 are attached (3×28 beads) to contact the T cells. In one aspect the cells (for example, 10⁴ to 10⁹ T cells) and beads (for example, DYNABEADS® M-450 CD3/CD28 T paramagnetic beads at a ratio of 1:1) are combined in a buffer, for example PBS (without divalent cations such as, calcium and magnesium). Again, those of ordinary skill in the art can readily appreciate any cell concentration may be used. For example, the target cell may be very rare in the sample and comprise only 0.01% of the sample or the entire sample (i.e., 100%) may comprise the target cell of interest. Accordingly, any cell number is within the context of the present invention. In certain aspects, it may be desirable to significantly decrease the volume in which particles and cells are mixed together (i.e., increase the concentration of cells), to ensure maximum contact of cells and particles. For example, in one aspect, a concentration of about 10 billion cells/ml, 9 billion/ml, 8 billion/ml, 7 billion/ml, 6 billion/ml, or billion/ml or 2 billion cells/ml is used. In one aspect, greater than 100 million cells/ml is used. In a further aspect, a concentration of cells of 10, 15, 20, 25, 30, 35, 40, 45, or 50 million cells/ml is used. In yet one aspect, a concentration of cells from 75, 80, 85, 90, 95, or 100 million cells/ml is used. In further aspects, concentrations of 125 or 150 million cells/ml can be used. Using high concentrations can result in increased cell yield, cell activation, and cell expansion. Further, use of high cell concentrations allows more efficient capture of cells that may weakly express target antigens of interest, such as CD28-negative T cells. Such populations of cells may have therapeutic value and would be desirable to obtain in certain aspects. For example, using high concentration of cells allows more efficient selection of CD8+ T cells that normally have weaker CD28 expression.

[0817] In one embodiment, cells transduced with a nucleic acid encoding a CAR, e.g., a CAR described herein, are expanded, e.g., by a method described herein. In one embodiment, the cells are expanded in culture for a period of several hours (e.g., about 2, 3, 4, 5, 6, 7, 8, 9, 10, 15, 18, 21 hours) to about 14 days (e.g., 1, 2, 3, 4, 5, 6, 7, 8, 9, 10, 11, 12, 13 or 14 days). In one embodiment, the cells are expanded for a period of 4 to 9 days. In one embodiment, the cells are expanded for a period of 8 days or less, e.g., 7, 6 or 5 days. In one embodiment, the cells, e.g., a CAR cell described herein, are expanded in culture for 5 days, and the resulting cells are more potent than the same cells expanded in culture for 9 days under the same culture conditions. Potency can be defined, e.g., by various T cell functions, e.g. proliferation, target cell killing, cytokine production, activation, migration, or combinations thereof. In one embodiment, the cells, e.g., a CD19 CAR cell described herein, expanded for 5 days show at least a one, two, three or four fold increase in cells doublings upon antigen stimulation as compared to the same cells expanded in culture for 9 days under the same culture conditions. In one embodiment, the cells, e.g., the cells expressing a CAR described herein, are expanded in culture for 5 days, and the resulting cells exhibit higher proinflammatory cytokine production, e.g., IFN-γ and/or GM-CSF levels, as compared to the same cells expanded in culture for 9 days under the same culture conditions. In one embodiment, the cells, e.g., a CAR cell described herein, expanded for 5 days show at least a one, two, three, four, five, ten fold or more increase in pg/ml of proinflammatory cytokine production, e.g., IFN-γ and/or GM-CSF levels, as compared to the same cells expanded in culture for 9 days under the same culture conditions.

[0818] In one aspect of the present invention, the mixture may be cultured for several hours (about 3 hours) to about 14 days or any hourly integer value in between. In one aspect, the mixture may be cultured for 21 days. In one aspect of the invention the beads and the T cells are cultured together for about eight days. In one aspect, the beads and T cells are cultured together for 2-3 days.

[0819] Several cycles of stimulation may also be desired such that culture time of T cells can be 60 days or more. Conditions appropriate for T cell culture include an appropriate media (e.g., Minimal Essential Media or RPMI Media 1640 or, X-vivo 15, (Lonza)) that may contain factors necessary for proliferation and viability, including serum (e.g., fetal bovine or human serum), interleukin-2 (IL-2), insulin, IFN-γ, IL-4, IL-7, GM-CSF, IL-10, IL-12, IL-15, TGFβ, and TNF-α or any other additives for the growth of cells known to the skilled artisan. Other additives for the growth of cells include, but are not limited to, surfactant, plasmanate, and reducing agents such as N-acetyl-cysteine and 2-mercaptoethanol. Media can include RPMI 1640, AIM-V, DMEM, MEM, α-MEM, F-12, X-Vivo 15, and X-Vivo 20, Optimizer, with added amino acids, sodium pyruvate, and vitamins, either serum-free or supplemented with an appropriate amount of serum (or plasma) or a defined set of hormones, and/or an amount of cytokine(s) sufficient for the growth and expansion of T cells. Antibiotics, e.g., penicillin and streptomycin, are included only in experimental cultures, not in cultures of cells that are to be infused into a subject. The target cells are maintained under conditions necessary to support growth, for example, an appropriate temperature (e.g., 37° C.) and atmosphere (e.g., air plus 5% CO₂).

[0820] In one embodiment, the cells are expanded in an appropriate media (e.g., media described herein) that includes one or more interleukin that result in at least a 200-fold (e.g., 200-fold, 250-fold, 300-fold, 350-fold) increase in cells over a 14 day expansion period, e.g., as measured by a method described herein such as flow cytometry. In one embodiment, the cells are expanded in the presence IL-15 and/or IL-7 (e.g., IL-15 and IL-7).

[0821] In some embodiments a CAR-expressing cell described herein (e.g., a T cell such as a CD4+ T cell or a CD8+ T cell) is contacted with a composition comprising a interleukin-15 (IL-15) polypeptide, a interleukin-15 receptor alpha (IL-15Ra) polypeptide, or a combination of both a IL-15 polypeptide and a IL-15Ra polypeptide e.g., hetIL-15, during the manufacturing of the CAR-expressing cell, e.g., ex vivo. In embodiments, a CAR-expressing cell described herein is contacted with a composition comprising a IL-15 polypeptide during the manufacturing of the CAR-expressing cell, e.g., ex vivo. In embodiments, a CAR-expressing cell described herein is contacted with a composition comprising a combination of both a IL-15 polypeptide and a IL-15 Ra polypeptide during the manufacturing of the CAR-expressing cell, e.g., ex vivo. In embodiments, a CAR-expressing cell described herein is contacted with a composition comprising hetIL-15 during the manufacturing of the CAR-expressing cell, e.g., ex vivo.

[0822] In one embodiment the CAR-expressing cell (e.g., a T cell or NK cell) described herein is contacted with a composition comprising hetIL-15 during ex vivo expansion. In an embodiment, the CAR-expressing cell described herein is contacted with a composition comprising an IL-15 polypeptide during ex vivo expansion. In an embodiment, the CAR-expressing cell described herein is contacted with a composition comprising both an IL-15 polypeptide and an IL-15Ra polypeptide during ex vivo expansion. In one embodiment the contacting results in the survival and proliferation of a lymphocyte subpopulation, e.g., CD8+ T cells.

[0823] In an embodiment, the method of making disclosed herein further comprises contacting the population of immune effector cells (e.g., T cells or NK cells) with a nucleic acid encoding a telomerase subunit, e.g., hTERT. The nucleic acid encoding the telomerase subunit can be DNA.

[0824] T cells that have been exposed to varied stimulation times may exhibit different characteristics. For example, typical blood or apheresed peripheral blood mononuclear cell products have a helper T cell population (TH, CD4+) that is greater than the cytotoxic or suppressor T cell population (TC, CD8+). Ex vivo expansion of T cells by stimulating CD3 and CD28 receptors produces a population of T cells that prior to about days 8-9 consists predominately of TH cells, while after about days 8-9, the population of T cells comprises an increasingly greater population of TC cells. Accordingly, depending on the purpose of treatment, infusing a subject with a T cell population comprising predominately of TH cells may be advantageous. Similarly, if an antigen-specific subset of TC cells has been isolated it may be beneficial to expand this subset to a greater degree.

[0825] Further, in addition to CD4 and CD8 markers, other phenotypic markers vary significantly, but in large part, reproducibly during the course of the cell expansion process. Thus, such reproducibility enables the ability to tailor an activated T cell product for specific purposes.

[0826] Once a CAR, e.g., CD19 CAR is constructed, various assays can be used to evaluate the activity of the molecule, such as but not limited to, the ability to expand T cells following antigen stimulation, sustain T cell expansion in the absence of re-stimulation, and anti-cancer activities in appropriate in vitro and animal models. Assays to evaluate the effects of a CAR, e.g., CD19 CAR are described in further detail below Western blot analysis of CAR expression in primary T cells can be used to detect the presence of monomers and dimers, e.g., as described in paragraph 695 of International Application WO2015/142675, filed Mar. 13, 2015, which is herein incorporated by reference in its entirety.

[0827] In vitro expansion of CAR⁺ T cells following antigen stimulation can be measured by flow cytometry. For example, a mixture of CD4+ and CD8+ T cells are stimulated with αCD3/αCD28 beads followed by transduction with lentiviral vectors expressing GFP under the control of the promoters to be analyzed. Exemplary promoters include the CMV IE gene, EF-la, ubiquitin C, or phosphoglycerokinase (PGK) promoters. GFP fluorescence is evaluated on day 6 of culture in the CD4+ and/or CD8+ T cell subsets by flow cytometry. See, e.g., Milone et al., Molecular Therapy 17(8): 1453-1464 (2009). Alternatively, a mixture of CD4+ and CD8+ T cells are stimulated with αCD3/αCD28 coated magnetic beads on day 0, and transduced with CAR on day 1 using a bicistronic lentiviral vector expressing CAR along with eGFP using a 2A ribosomal skipping sequence. Cultures are re-stimulated with either CD19⁺ K562 cells (K562-CD19), wild-type K562 cells (K562 wild type) or K562 cells expressing hCD32 and 4-1BBL in the presence of anti-CD3 and anti-CD28 antibody (K562-BBL-3/28) following washing. Exogenous IL-2 is added to the cultures every other day at 100 IU/ml. GFP⁺ T cells are enumerated by flow cytometry using bead-based counting. See, e.g., Milone et al., Molecular Therapy 17(8): 1453-1464 (2009).

[0828] Sustained CAR⁺ T cell expansion in the absence of re-stimulation can also be measured. See, e.g., Milone et al., Molecular Therapy 17(8): 1453-1464 (2009). Briefly, mean T cell volume (fl) is measured on day 8 of culture using a Coulter Multisizer particle counter, a Nexcelom Cellometer Vision, or Millipore Scepter following stimulation with αCD3/αCD28 coated magnetic beads on day 0, and transduction with the indicated CAR on day 1.

[0829] Animal models can also be used to measure a CAR-expressing cell activity, e.g., as described in paragraph 698 of International Application WO2015/142675, filed Mar. 13, 2015, which is herein incorporated by reference in its entirety.

[0830] Dose dependent CAR treatment response can be evaluated, e.g., as described in paragraph 699 of International Application WO2015/142675, filed Mar. 13, 2015, which is herein incorporated by reference in its entirety. Assessment of cell proliferation and cytokine production has been previously described, e.g., as described in paragraph 700 of International Application WO2015/142675, filed Mar. 13, 2015, which is herein incorporated by reference in its entirety. Cytotoxicity can be assessed by a standard ⁵¹Cr-release assay, e.g., as described in paragraph 701 of International Application WO2015/142675, filed Mar. 13, 2015, which is herein incorporated by reference in its entirety. Imaging technologies can be used to evaluate specific trafficking and proliferation of CARs in tumor-bearing animal models, e.g., as described in paragraph 702 of International Application WO2015/142675, filed Mar. 13, 2015, which is herein incorporated by reference in its entirety.

[0831] Other assays, including those described in the Example section herein as well as those that are known in the art can also be used to evaluate the CARs described herein.

[0832] Alternatively, or in combination to the methods disclosed herein, methods and compositions for one or more of detection and/or quantification of CAR-expressing cells (e.g., in vitro or in vivo (e.g., clinical monitoring)), immune cell expansion and/or activation, and/or CAR-specific selection, that involve the use of a CAR ligand, are disclosed. In one exemplary embodiment, the CAR ligand is an antibody that binds to the CAR molecule, e.g., binds to the extracellular antigen binding domain of CAR (e.g., an antibody that binds to the antigen binding domain, e.g., an anti-idiotypic antibody; or an antibody that binds to a constant region of the extracellular binding domain). In other embodiments, the CAR ligand is a CAR antigen molecule (e.g., a CAR antigen molecule as described herein).

[0833] In one aspect, a method for detecting and/or quantifying CAR-expressing cells is disclosed. For example, the CAR ligand can be used to detect and/or quantify CAR-expressing cells in vitro or in vivo (e.g., clinical monitoring of CAR-expressing cells in a patient, or dosing a patient). The method includes:

[0834] providing the CAR ligand (optionally, a labelled CAR ligand, e.g., a CAR ligand that includes a tag, a bead, a radioactive or fluorescent label);

[0835] acquiring the CAR-expressing cell (e.g., acquiring a sample containing CAR-expressing cells, such as a manufacturing sample or a clinical sample);

[0836] contacting the CAR-expressing cell with the CAR ligand under conditions where binding occurs, thereby detecting the level (e.g., amount) of the CAR-expressing cells present. Binding of the CAR-expressing cell with the CAR ligand can be detected using standard techniques such as FACS, ELISA and the like.

[0837] In another aspect, a method of expanding and/or activating cells (e.g., immune effector cells) is disclosed. The method includes:

[0838] providing a CAR-expressing cell (e.g., a first CAR-expressing cell or a transiently expressing CAR cell);

[0839] contacting said CAR-expressing cell with a CAR ligand, e.g., a CAR ligand as described herein), under conditions where immune cell expansion and/or proliferation occurs, thereby producing the activated and/or expanded cell population.

[0840] In certain embodiments, the CAR ligand is present on (e.g., is immobilized or attached to a substrate, e.g., a non-naturally occurring substrate). In some embodiments, the substrate is a non-cellular substrate. The non-cellular substrate can be a solid support chosen from, e.g., a plate (e.g., a microtiter plate), a membrane (e.g., a nitrocellulose membrane), a matrix, a chip or a bead. In embodiments, the CAR ligand is present in the substrate (e.g., on the substrate surface). The CAR ligand can be immobilized, attached, or associated covalently or non-covalently (e.g., cross-linked) to the substrate. In one embodiment, the CAR ligand is attached (e.g., covalently attached) to a bead. In the aforesaid embodiments, the immune cell population can be expanded in vitro or ex vivo. The method can further include culturing the population of immune cells in the presence of the ligand of the CAR molecule, e.g., using any of the methods described herein.

[0841] In other embodiments, the method of expanding and/or activating the cells further comprises addition of a second stimulatory molecule, e.g., CD28. For example, the CAR ligand and the second stimulatory molecule can be immobilized to a substrate, e.g., one or more beads, thereby providing increased cell expansion and/or activation.

[0842] In other embodiments, a method for selecting or enriching for a CAR expressing cell is provided. The method includes contacting the CAR expressing cell with a CAR ligand as described herein; and selecting the cell on the basis of binding of the CAR ligand.

[0843] In yet other embodiments, a method for depleting (e.g., reducing and/or killing) a CAR expressing cell is provided. The method includes contacting the CAR expressing cell with a CAR ligand as described herein; and targeting the cell on the basis of binding of the CAR ligand thereby reducing the number, and/or killing, the CAR-expressing cell. In one embodiment, the CAR ligand is coupled to a toxic agent (e.g., a toxin or a cell ablative drug). In another embodiment, the anti-idiotypic antibody can cause effector cell activity, e.g., ADCC or ADC activities.

[0844] Exemplary anti-CAR antibodies that can be used in the methods disclosed herein are described, e.g., in WO 2014/190273 and by Jena et al., “Chimeric Antigen Receptor (CAR)-Specific Monoclonal Antibody to Detect CD19-Specific T cells in Clinical Trials”, PLOS March 2013 8:3 e57838, the contents of which are incorporated by reference. In some aspects and embodiments, the compositions and methods herein are optimized for a specific subset of T cells, e.g., as described in US Serial No. PCT/US2015/043219 filed Jul. 31, 2015, the contents of which are incorporated herein by reference in their entirety. In some embodiments, the optimized subsets of T cells display an enhanced persistence compared to a control T cell, e.g., a T cell of a different type (e.g., CD8+ or CD4+) expressing the same construct.

[0845] In some embodiments, a CD4+ T cell comprises a CAR described herein, which CAR comprises an intracellular signaling domain suitable for (e.g., optimized for, e.g., leading to enhanced persistence in) a CD4+ T cell, e.g., an ICOS domain. In some embodiments, a CD8+ T cell comprises a CAR described herein, which CAR comprises an intracellular signaling domain suitable for (e.g., optimized for, e.g., leading to enhanced persistence of) a CD8+ T cell, e.g., a 4-1BB domain, a CD28 domain, or another costimulatory domain other than an ICOS domain. In some embodiments, the CAR described herein comprises an antigen binding domain described herein, e.g., a CAR comprising an antigen binding domain.

[0846] In an aspect, described herein is a method of treating a subject, e.g., a subject having cancer. The method includes administering to said subject, an effective amount of:

[0847] 1) a CD4+ T cell comprising a CAR (the CARCD4+) comprising:

[0848] an antigen binding domain, e.g., an antigen binding domain described herein;

[0849] a transmembrane domain; and

[0850] an intracellular signaling domain, e.g., a first costimulatory domain, e.g., an ICOS domain; and

[0851] 2) a CD8+ T cell comprising a CAR (the CARCD8+) comprising:

[0852] an antigen binding domain, e.g., an antigen binding domain described herein;

[0853] a transmembrane domain; and

[0854] an intracellular signaling domain, e.g., a second costimulatory domain, e.g., a 4-1BB domain, a CD28 domain, or another costimulatory domain other than an ICOS domain;

[0855] wherein the CARCD4+ and the CARCD8+ differ from one another.

[0856] Optionally, the method further includes administering:

[0857] 3) a second CD8+ T cell comprising a CAR (the second CARCD8+) comprising:

[0858] an antigen binding domain, e.g., an antigen binding domain described herein;

[0859] a transmembrane domain; and

[0860] an intracellular signaling domain, wherein the second CARCD8+ comprises an intracellular signaling domain, e.g., a costimulatory signaling domain, not present on the CARCD8+, and, optionally, does not comprise an ICOS signaling domain.

### Methods of Manufacture/Production

[0861] In some embodiments, the methods disclosed herein further include administering a T cell depleting agent after treatment with the cell (e.g., an immune effector cell as described herein, e.g., an immune effector cell expressing CAR driven by a truncated PGK1 promoter), thereby reducing (e.g., depleting) the CAR-expressing cells (e.g., the CD19CAR-expressing cells). Such T cell depleting agents can be used to effectively deplete CAR-expressing cells (e.g., CD19CAR-expressing cells) to mitigate toxicity. In some embodiments, the CAR-expressing cells were manufactured according to a method herein, e.g., assayed (e.g., before or after transfection or transduction) according to a method herein.

[0862] In some embodiments, the T cell depleting agent is administered one, two, three, four, or five weeks after administration of the cell, e.g., the population of immune effector cells, described herein.

[0863] In one embodiment, the T cell depleting agent is an agent that depletes CAR-expressing cells, e.g., by inducing antibody dependent cell-mediated cytotoxicity (ADCC) and/or complement-induced cell death. For example, CAR-expressing cells described herein may also express an antigen (e.g., a target antigen) that is recognized by molecules capable of inducing cell death, e.g., ADCC or complement-induced cell death. For example, CAR expressing cells described herein may also express a target protein (e.g., a receptor) capable of being targeted by an antibody or antibody fragment. Examples of such target proteins include, but are not limited to, EpCAM, VEGFR, integrins (e.g., integrins αvβ3, α4, αI3/4β3, α4β7, α5β1, αvβ3, αv), members of the TNF receptor superfamily (e.g., TRAIL-R1, TRAIL-R2), PDGF Receptor, interferon receptor, folate receptor, GPNMB, ICAM-1, HLA-DR, CEA, CA-125, MUC1, TAG-72, IL-6 receptor, 5T4, GD2, GD3, CD2, CD3, CD4, CD5, CD11, CD11a/LFA-1, CD15, CD18/ITGB2, CD19, CD20, CD22, CD23/lgE Receptor, CD25, CD28, CD30, CD33, CD38, CD40, CD41, CD44, CD51, CD52, CD62L, CD74, CD80, CD125, CD147/basigin, CD152/CTLA-4, CD154/CD40L, CD195/CCR5, CD319/SLAMF7, and EGFR, and truncated versions thereof (e.g., versions preserving one or more extracellular epitopes but lacking one or more regions within the cytoplasmic domain).

[0864] In some embodiments, the CAR expressing cell co-expresses the CAR and the target protein, e.g., naturally expresses the target protein or is engineered to express the target protein. For example, the cell, e.g., the population of immune effector cells, can include a nucleic acid (e.g., vector) comprising the CAR nucleic acid (e.g., a CAR nucleic acid as described herein) and a nucleic acid encoding the target protein.

[0865] In one embodiment, the T cell depleting agent is a CD52 inhibitor, e.g., an anti-CD52 antibody molecule, e.g., alemtuzumab.

[0866] In other embodiments, the cell, e.g., the population of immune effector cells, expresses a CAR molecule as described herein (e.g., CD19CAR) and the target protein recognized by the T cell depleting agent. In one embodiment, the target protein is CD20. In embodiments where the target protein is CD20, the T cell depleting agent is an anti-CD20 antibody, e.g., rituximab.

[0867] In further embodiments of any of the aforesaid methods, the methods further include transplanting a cell, e.g., a hematopoietic stem cell, or a bone marrow, into the mammal.

[0868] In another aspect, the invention features a method of conditioning a mammal prior to cell transplantation. The method includes administering to the mammal an effective amount of the cell comprising a CAR nucleic acid or polypeptide, e.g., a CD19 CAR nucleic acid or polypeptide. In some embodiments, the cell transplantation is a stem cell transplantation, e.g., a hematopoietic stem cell transplantation, or a bone marrow transplantation. In other embodiments, conditioning a subject prior to cell transplantation includes reducing the number of target-expressing cells in a subject, e.g., CD19-expressing normal cells or CD19-expressing cancer cells.

### Biopolymer Delivery Methods

[0869] In some embodiments, one or more CAR-expressing cells as disclosed herein can be administered or delivered to the subject via a biopolymer scaffold, e.g., a biopolymer implant. Biopolymer scaffolds can support or enhance the delivery, expansion, and/or dispersion of the CAR-expressing cells described herein. A biopolymer scaffold comprises a biocompatible (e.g., does not substantially induce an inflammatory or immune response) and/or a biodegradable polymer that can be naturally occurring or synthetic. Exemplary biopolymers are described, e.g., in paragraphs 1004-1006 of International Application WO2015/142675, filed Mar. 13, 2015, which is herein incorporated by reference in its entirety.

### Therapeutic Applications

[0870] CD19 Associated Diseases and/or Disorders

[0871] In one aspect, the invention provides methods for treating a disease associated with CD19 expression. In one aspect, the invention provides methods for treating a disease wherein part of the cancer is negative for CD19 and part of the cancer is positive for CD19. For example, the methods and compositions of the invention are useful for treating subjects that have undergone treatment for a disease associated with expression of CD19, wherein the subject that has undergone treatment related to CD19 expression, e.g., treatment with a CD19 CAR, exhibits a disease associated with expression of CD19.

[0872] In another aspect, the invention provides methods for treating a disease associated with expression of a B-cell antigen, e.g., one or more of CD10, CD20, CD22, CD34, CD123, FLT-3, or ROR1. In one aspect, the invention provides methods for treating a disease wherein part of the tumor is negative for the B-cell antigen and part of the tumor is positive for B-cell antigen. For example, the compositions and methods of the invention are useful for treating subjects that have undergone treatment for a disease associated with expression of the B-cell antigen, wherein the subject that has undergone treatment related to expression of a B-cell antigen, e.g., treatment with a CAR targeting a B-cell antigen, exhibits a disease associated with expression of the B-cell antigen. In a third aspect, the invention provides methods for treating a disease associated with expression of the B-cell antigen, e.g., associated with the expression of CD19 and one or more other B-cell antigens.

[0873] In one aspect, the invention pertains to a vector comprising CD19 CAR operably linked to promoter for expression in mammalian cells, e.g., T cells or NK cells. In one aspect, the invention provides a recombinant cell, e.g., a T cell or NK cell, expressing the CD19 CAR for use in treating CD19-expressing cancers, wherein the recombinant T cell expressing the CD19 CAR is termed a CD19 CART. In one aspect, the CD19 CART described herein, is capable of contacting a cancer cell with at least one CD19 CAR expressed on its surface such that the CART targets the cancer cell and growth of the cancer is inhibited.

[0874] In one aspect, the invention pertains to a method of inhibiting growth of a CD19-expressing cancer cell, comprising contacting the cancer cell with a CD19 CAR expressing cell, e.g., a CD19 CART cell, described, and one or more other CAR expressing cells, e.g., as described herein, such that the CART is activated in response to the antigen and targets the cancer cell, wherein the growth of the cancer is inhibited. The CD19 CAR-expressing cell, e.g., T cell, is administered in combination with a B-cell inhibitor, e.g., a B-cell inhibitor described herein.

[0875] In an aspect, the disclosure provides one or more B-cell inhibitors, wherein the B-cell inhibitor comprises an inhibitor of one or more of CD10, CD20, CD22, CD34, CD123, FLT-3, ROR1, CD79b, CD179b, or CD79a, for use in the treatment of a subject having a disease associated with expression of CD19, and wherein said subject has received, is receiving or is about to receive a cell that expresses a CAR molecule that binds CD19, e.g., a CD19 CAR.

[0876] In some embodiments, the CD19 inhibitor (e.g., one or more cells that express a CAR molecule that binds CD19, e.g., a CAR molecule that binds CD19 described herein) and the B cell inhibitor (e.g., one or more inhibitors of CD10, CD19, CD20, CD22, CD34, CD123, FLT-3, or ROR1, e.g., as described herein) are administered simultaneously. In some embodiments, the CD19 inhibitor and the B cell inhibitor are infused into a subject simultaneously, e.g., are admixed in the same infusion volume. In other embodiments, the simultaneous administration comprises separate administration of the CD19 inhibitor and the B cell inhibitor, e.g., administration of each is initiated within a predetermined time interval (e.g., within 15, 30, or 45 minutes of each other).

[0877] In some embodiments, the start of CD19 inhibitor delivery and the start of B cell inhibitor delivery are within 1, 2, 3, 4, 6, 12, 18, or 24 hours of each other, or within 1, 2, 3, 4, 5, 10, 15, 20, 25, 30, 35, 40, 60, 80, or 100 days of each other. In some embodiments, the end of CD19 inhibitor delivery and the end of B cell inhibitor delivery are within 1, 2, 3, 4, 6, 12, 18, or 24 hours of each other, or within 1, 2, 3, 4, 5, 10, 15, 20, 25, 30, 35, 40, 60, 80, or 100 days of each other. In some embodiments, the overlap in terms of administration between the CD19 inhibitor delivery (e.g., infusion) and the end of B cell inhibitor delivery (e.g., infusion) is at least 1, 2, 3, 4, 5, 10, 15, 20, 25, 30, or 45 minutes.

[0878] In some embodiments, the B cell inhibitor is administered while the one or more cells that express a CAR molecule that binds CD19 are present (e.g., undergoing expansion) in the subject. In some embodiments, the CD19 inhibitor is administered while the one or more cells that express a CAR molecule that binds one or more of CD10, CD20, CD22, CD34, CD123, FLT-3, ROR1, CD79b, CD179b, or CD79a are present (e.g., undergoing expansion) in the subject.

[0879] The invention includes (among other things) a type of cellular therapy where T cells are genetically modified to express a chimeric antigen receptor (CAR) and the CAR T cell is infused to a recipient in need thereof. The infused cell is able to kill tumor cells in the recipient. Unlike antibody therapies, CAR-modified T cells are able to replicate in vivo resulting in long-term persistence that can lead to sustained tumor control. In various aspects, the T cells administered to the patient, or their progeny, persist in the patient for at least four months, five months, six months, seven months, eight months, nine months, ten months, eleven months, twelve months, thirteen months, fourteen month, fifteen months, sixteen months, seventeen months, eighteen months, nineteen months, twenty months, twenty-one months, twenty-two months, twenty-three months, two years, three years, four years, or five years after administration of the T cell to the patient.

[0880] The invention also includes a type of cellular therapy where immune effector cells, e.g., NK cells or T cells are modified, e.g., by in vitro transcribed RNA, to transiently express a chimeric antigen receptor (CAR) and the CAR-expressing (e.g., CAR T) cell is infused to a recipient in need thereof. The infused cell is able to kill cancer cells in the recipient. Thus, in various aspects, the CAR-expressing cells, e.g., T cells, administered to the patient, is present for less than one month, e.g., three weeks, two weeks, one week, after administration of the CAR-expressing cell, e.g., T cell, to the patient.

[0881] Without wishing to be bound by any particular theory, the anti-cancer immunity response elicited by the CAR-modified T cells may be an active or a passive immune response, or alternatively may be due to a direct vs indirect immune response. In one aspect, the CAR (e.g., CD19-CAR) transduced T cells exhibit specific proinflammatory cytokine secretion and potent cytolytic activity in response to human cancer cells expressing the target antigen (e.g., CD19), resist soluble target antigen inhibition, mediate bystander killing and mediate regression of an established human cancer. For example, antigen-less cancer cells within a heterogeneous field of target antigen-expressing cancer may be susceptible to indirect destruction by target antigen-redirected T cells that has previously reacted against adjacent antigen-positive cancer cells.

[0882] In one aspect, the CAR-modified cells of the invention, e.g., fully human CAR T cells, may be a type of vaccine for ex vivo immunization and/or in vivo therapy in a mammal. In one aspect, the mammal is a human.

[0883] With respect to ex vivo immunization, at least one of the following occurs in vitro prior to administering the cell into a mammal: i) expansion of the cells, ii) introducing a nucleic acid encoding a CAR to the cells or iii) cryopreservation of the cells.

[0884] Ex vivo procedures are well known in the art and are discussed more fully below. Briefly, cells are isolated from a mammal (e.g., a human) and genetically modified (i.e., transduced or transfected in vitro) with a vector expressing a CAR disclosed herein. The CAR-modified cell can be administered to a mammalian recipient to provide a therapeutic benefit. The mammalian recipient may be a human and the CAR-modified cell can be autologous with respect to the recipient. Alternatively, the cells can be allogeneic, syngeneic or xenogeneic with respect to the recipient.

[0885] The procedure for ex vivo expansion of hematopoietic stem and progenitor cells is described in U.S. Pat. No. 5,199,942, incorporated herein by reference, can be applied to the cells of the present invention. Other suitable methods are known in the art, therefore the present invention is not limited to any particular method of ex vivo expansion of the cells. Briefly, ex vivo culture and expansion of T cells can comprise: (1) collecting CD34+ hematopoietic stem and progenitor cells from a mammal from peripheral blood harvest or bone marrow explants; and (2) expanding such cells ex vivo. In addition to the cellular growth factors described in U.S. Pat. No. 5,199,942, other factors such as flt3-L, IL-1, IL-3 and c-kit ligand, can be used for culturing and expansion of the cells.

[0886] In addition to using a cell-based vaccine in terms of ex vivo immunization, also included in the methods described herein are compositions and methods for in vivo immunization to elicit an immune response directed against an antigen in a patient.

[0887] Generally, the cells activated and expanded as described herein may be utilized in the treatment and prevention of diseases that arise in individuals who are immunocompromised. In particular, the CAR-expressing cells described herein are used in the treatment of diseases, disorders and conditions associated with expression of one or more B-cell antigen. In certain aspects, the cells are used in the treatment of patients at risk for developing diseases, disorders and conditions associated with expression of one or more B-cell antigen. Thus, the present invention provides (among other things) methods for the treatment or prevention of diseases, disorders and conditions associated with expression of a B-cell antigen comprising administering to a subject in need thereof, a therapeutically effective amount of the CD19 CAR-expressing cells described herein, in combination with one or more of B-cell inhibitor described herein.

[0888] In one embodiment, the therapy described herein (e.g., a CD19 CAR therapy, or a combination of the B-cell inhibitor and the cells expressing a CD19 CAR molecule, e.g., a CD19 CAR molecule described herein) are administered as a first line treatment for the disease, e.g., the cancer, e.g., the cancer described herein. In another embodiment, the therapy described herein (e.g., a CD19 CAR therapy, or a combination of the B-cell inhibitor and the cells expressing a CD19 CAR molecule, e.g., a CD19 CAR molecule described herein) are administered as a second, third, fourth line treatment for the disease, e.g., the cancer, e.g., the cancer described herein.

[0889] In an embodiment, the method further comprises administering a CD19 inhibitor, e.g., a CD19 CAR-expressing cell. In an embodiment, the CD19 inhibitor comprises a CD19 CAR and the B-cell inhibitor comprises a CD123 CAR. In an embodiment, the CD19 CAR or CD123 CAR comprises a split intracellular signaling domain such that full activation of the cell, e.g., the population of immune effector cells, occurs when both the CD19 CAR and CD123 CAR bind to a target cell, e.g., a target CD19+CD123+ cell (e.g., a B-ALL blast cell), compared to activation when the CD19 CAR and CD123 CAR bind to a target cell that expresses one of CD19 or CD123 (e.g., a hematopoietic stem cell). In an embodiment, the CD123CAR comprises a 4-1BB signaling domain and the CD19 CAR comprises a CD3 zeta signaling domain. In an embodiment, the CD123CAR comprises a costimulatory domain, e.g., a 4-1BB signaling domain, and the CD19 CAR comprises a primary signaling domain, e.g., a CD3 zeta signaling domain. In an embodiment, the CD123CAR comprises a primary signaling domain, e.g., a CD3 zeta signaling domain, and the CD19 CAR comprises a costimulatory domain, e.g., a 4-1BB signaling domain. In an embodiment, the B cell inhibitor comprises a CAR (e.g., a CAR directed against CD10, CD20, CD22, CD34, CD123, FLT-3, ROR1, CD79b, CD179b, or CD79a) which comprises a costimulatory domain, and the CD19 CAR comprises a primary signaling domain. In an embodiment, the B cell inhibitor comprises a CAR (e.g., a CAR directed against CD10, CD20, CD22, CD34, CD123, FLT-3, ROR1, CD79b, CD179b, or CD79a) which comprises a primary signalling domain, and the CD19 CAR comprises a costimulatory domain. In an embodiment, the B-cell inhibitor comprises one or more cells that express a CAR molecule that binds CD123, and wherein a CD19 CAR-expressing cell is administered simultaneously with the B-cell inhibitor. In an embodiment, the CD123CAR comprises a 4-1BB signaling domain and the CD19 CAR comprises a CD3 zeta signaling domain.

[0890] The present invention also provides methods for inhibiting the proliferation or reducing a CD19-expressing cell population, the methods comprising contacting a population of cells comprising a CD19-expressing cell with an anti-CD19 CAR-expressing cell described herein that binds to the CD19-expressing cell, and contacting the population of CD19-expressing cells with one or more of a B-cell inhibitor described herein. In a specific aspect, the present invention provides methods for inhibiting the proliferation or reducing the population of cancer cells expressing CD19, the methods comprising contacting the CD19-expressing cancer cell population with an anti-CD19 CAR-expressing cell described herein that binds to the CD19-expressing cell, and contacting the CD19-expressing cell with one or more B-cell described herein. In one aspect, the present invention provides methods for inhibiting the proliferation or reducing the population of cancer cells expressing CD19, the methods comprising contacting the CD19-expressing cancer cell population with an anti-CD19 CAR-expressing cell described herein that binds to the CD19-expressing cell and contacting the CD19-expressing cell with one or more B-cell described herein. In certain aspects, the combination of the anti-CD19 CAR-expressing cell described herein and one or more B-cell described herein reduces the quantity, number, amount or percentage of cells and/or cancer cells by at least 25%, at least 30%, at least 40%, at least 50%, at least 65%, at least 75%, at least 85%, at least 95%, or at least 99% in a subject with or animal model for a hematological cancer or another cancer associated with CD19-expressing cells relative to a negative control. In one aspect, the subject is a human.

[0891] The present invention also provides methods for inhibiting the proliferation or reducing a cell population comprising CD19-expressing cells and cells expressing a second B-cell antigen. In one aspect, CD19 and second B-cell antigen are expressed by the same cells within the population. In another aspect, CD19 and second B-cell antigen are expressed by distinct subsets of cells within the population. In another aspect, CD19 and second B-cell antigen are expressed by overlapping subsets of cells within the population, such that some cells express CD19 and second B-cell antigen, some cells express CD19, and some cells express the second B-cell antigen.

[0892] The present invention also provides methods for inhibiting the proliferation or reducing a cell population expressing CD19 and a second B-cell antigen, the methods comprising (i) contacting a population of cells comprising a CD19-expressing cell with an anti-CD19 CAR-expressing cell described herein that binds to the CD19-expressing cell, and (ii) contacting the second B-cell antigen-expressing cell with a second CAR-expressing cell described herein that binds to the second B-cell antigen-expressing cell. In a specific aspect, the present invention provides methods for inhibiting the proliferation or reducing the population of cancer cells expressing CD19 and a second B-cell antigen, the methods comprising (i) contacting the CD19-expressing cancer cell population with an anti-CD19 CAR-expressing cell described herein that binds to the CD19-expressing cell, and (ii) contacting the second B-cell antigen-expressing cell population with a second CAR-expressing cell described herein that binds to the cell expressing the second B-cell antigen. In one aspect, the present invention provides methods for inhibiting the proliferation or reducing the population of cancer cells expressing CD19 and/or a second B-cell antigen, the methods comprising (i) contacting the CD19-expressing cancer cell population with an anti-CD19 CAR-expressing cell described herein that binds to the CD19-expressing cell and (ii) contacting the second B-cell antigen-expressing cell population with a second CAR-expressing cell described herein that binds to the cell expressing the second B-cell antigen. In certain aspects, the combination of the anti-CD19 CAR-expressing cell described herein and the second CAR-expressing cell described herein, reduces the quantity, number, amount or percentage of cells and/or cancer cells by at least 25%, at least 30%, at least 40%, at least 50%, at least 65%, at least 75%, at least 85%, at least 95%, or at least 99% in a subject with or animal model for a hematological cancer or another cancer associated with CD19 and/or second B-cell antigen-expressing cells relative to a negative control. In one aspect, the subject is a human.

[0893] The present invention also provides methods for preventing, treating and/or managing a disease associated with CD19-expressing cells (e.g., a hematologic cancer or atypical cancer expressing CD19), the methods comprising administering to a subject in need an anti-CD19 CAR-expressing cell that binds to the CD19-expressing cell and administering one or B-cell inhibitor described herein. In one aspect, the subject is a human. Non-limiting examples of disorders associated with CD19-expressing cells include autoimmune disorders (such as lupus), inflammatory disorders (such as allergies and asthma) and cancers (such as hematological cancers or atypical cancers expressing CD19).

[0894] The present invention also provides methods for preventing, treating and/or managing a disease associated with CD19 and/or a second B-cell antigen-expressing cells (e.g., a hematologic cancer or atypical cancer expressing CD19 and/or second B-cell antigen), the methods comprising administering to a subject in need an anti-CD19 CAR-expressing cell that binds to the CD19-expressing cell and a B-cell inhibitor.

[0895] The present invention also provides methods for preventing, treating and/or managing a disease associated with CD19-expressing cells, the methods comprising administering to a subject in need an anti-CD19 CART cell of the invention that binds to the CD19-expressing cell. In one aspect, the subject is a human.

[0896] The present invention also provides methods for preventing relapse of cancer associated with CD19-expressing cells, the methods comprising administering to a subject in need thereof an anti-CD19 CART cell of the invention that binds to the CD19-expressing cell. In one aspect, the methods comprise administering to the subject in need thereof an effective amount of an anti-CD19 CART cell described herein that binds to the CD19-expressing cell in combination with an effective amount of another therapy.

[0897] In one aspect, the invention pertains to a method of treating cancer in a subject. The method comprises administering to the subject a CD19 CAR-expressing cell, e.g., T cell, described herein, in combination with a B-cell inhibitor, such that the cancer is treated in the subject. An example of a cancer that is treatable by the methods described herein is a cancer associated with expression of CD19. In one embodiment, the disease is a solid or liquid tumor. In one embodiment, the disease is a hematologic cancer, e.g., as described herein.

[0898] Non-cancer related indications associated with expression of CD19 include, but are not limited to, e.g., autoimmune disease, (e.g., lupus), inflammatory disorders (allergy and asthma) and transplantation.

[0899] In one aspect, the CAR of the invention can be used to eradicate CD19-expressing normal cells, thereby applicable for use as a cellular conditioning therapy prior to cell transplantation. In one aspect, the CD19-expressing normal cell is a CD19-expressing normal stem cell and the cell transplantation is a stem cell transplantation.

[0900] In some embodiments, a cancer that can be treated with the combination described herein is multiple myeloma. Multiple myeloma is a cancer of the blood, characterized by accumulation of a plasma cell clone in the bone marrow. Current therapies for multiple myeloma include, but are not limited to, treatment with lenalidomide, which is an analog of thalidomide. Lenalidomide has activities which include anti-tumor activity, angiogenesis inhibition, and immunomodulation. In some embodiments, a CD19 CAR, e.g., as described herein, may be used to target myeloma cells. In some embodiments, the combination described herein can be used with one or more additional therapies, e.g., lenalidomide treatment.

[0901] The CAR-expressing cells described herein may be administered either alone, or as a pharmaceutical composition in combination with diluents and/or with other components such as IL-2 or other cytokines or cell populations.

### Hematologic Cancers

[0902] Hematological cancer conditions are the types of cancer such as leukemia, lymphoma and malignant lymphoproliferative conditions that affect blood, bone marrow and the lymphatic system.

[0903] In one embodiment, the hematologic cancer is leukemia. In one embodiment, the cancer is selected from the group consisting of one or more acute leukemias including but not limited to B-cell acute lymphoid leukemia (BALL), T-cell acute lymphoid leukemia (TALL), small lymphocytic leukemia (SLL), acute lymphoid leukemia (ALL); one or more chronic leukemias including but not limited to chronic myelogenous leukemia (CML), chronic lymphocytic leukemia (CLL); additional hematologic cancers or hematologic conditions including, but not limited to mantle cell lymphoma (MCL), B cell prolymphocytic leukemia, blastic plasmacytoid dendritic cell neoplasm, Burkitt's lymphoma, diffuse large B cell lymphoma, follicular lymphoma, hairy cell leukemia, small cell- or a large cell-follicular lymphoma, malignant lymphoproliferative conditions, MALT lymphoma, Marginal zone lymphoma, multiple myeloma, myelodysplasia and myelodysplastic syndrome, non-Hodgkin lymphoma, Hodgkin lymphoma, plasmablastic lymphoma, plasmacytoid dendritic cell neoplasm, Waldenstrom macroglobulinemia, and “preleukemia” which are a diverse collection of hematological conditions united by ineffective production (or dysplasia) of myeloid blood cells. Diseases associated with CD19, CD20, or CD22 expression include, but not limited to atypical and/or non-classical cancers, malignancies, precancerous conditions or proliferative diseases expressing CD19, CD20, or CD22; and any combination thereof.

[0904] Leukemia can be classified as acute leukemia and chronic leukemia. Acute leukemia can be further classified as acute myelogenous leukemia (AML) and acute lymphoid leukemia (ALL). Chronic leukemia includes chronic myelogenous leukemia (CML) and chronic lymphoid leukemia (CLL). Other related conditions include myelodysplastic syndromes (MDS, formerly known as “preleukemia”) which are a diverse collection of hematological conditions united by ineffective production (or dysplasia) of myeloid blood cells and risk of transformation to AML.

[0905] Lymphoma is a group of blood cell tumors that develop from lymphocytes. Exemplary lymphomas include non-Hodgkin lymphoma and Hodgkin lymphoma.

[0906] In an aspect, the invention pertains to a method of treating a mammal having Hodgkin lymphoma, comprising administering to the mammal an effective amount of the cells expressing a CD19 CAR molecule, e.g., a CD19 CAR molecule described herein and a B-cell inhibitor.

[0907] In one aspect, the compositions and CART cells or CAR expressing NK cells of the present invention are particularly useful for treating B cell malignancies, such as non-Hodgkin lymphomas, e.g., DLBCL, Follicular lymphoma, or CLL.

[0908] Non-Hodgkin lymphoma (NHL) is a group of cancers of lymphocytes, formed from either B or T cells. NHLs occur at any age and are often characterized by lymph nodes that are larger than normal, weight loss, and fever. Different types of NHLs are categorized as aggressive (fast-growing) and indolent (slow-growing) types. B-cell non-Hodgkin lymphomas include Burkitt lymphoma, chronic lymphocytic leukemia/small lymphocytic lymphoma (CLL/SLL), diffuse large B-cell lymphoma (DLBCL), follicular lymphoma, immunoblastic large cell lymphoma, precursor B-lymphoblastic lymphoma, and mantle cell lymphoma. Examples of T-cell non-Hodgkin lymphomas include mycosis fungoides, anaplastic large cell lymphoma, and precursor T-lymphoblastic lymphoma. Lymphomas that occur after bone marrow or stem cell transplantation are typically B-cell non-Hodgkin lymphomas. See, e.g., Maloney. NEJM. 366.21(2012):2008-16.

[0909] Diffuse large B-cell lymphoma (DLBCL) is a form of NHL that develops from B cells. DLBCL is an aggressive lymphoma that can arise in lymph nodes or outside of the lymphatic system, e.g., in the gastrointestinal tract, testes, thyroid, skin, breast, bone, or brain. Three variants of cellular morphology are commonly observed in DLBCL: centroblastic, immunoblastic, and anaplastic. Centroblastic morphology is most common and has the appearance of medium-to-large-sized lymphocytes with minimal cytoplasm. There are several subtypes of DLBCL. For example, primary central nervous system lymphoma is a type of DLBCL that only affects the brain is called and is treated differently than DLBCL that affects areas outside of the brain. Another type of DLBCL is primary mediastinal B-cell lymphoma, which often occurs in younger patients and grows rapidly in the chest. Symptoms of DLBCL include a painless rapid swelling in the neck, armpit, or groin, which is caused by enlarged lymph nodes. For some subjects, the swelling may be painful. Other symptoms of DLBCL include night sweats, unexplained fevers, and weight loss. Although most patients with DLBCL are adults, this disease sometimes occurs in children. Treatment for DLBCL includes chemotherapy (e.g., cyclophosphamide, doxorubicin, vincristine, prednisone, etoposide), antibodies (e.g., Rituxan), radiation, or stem cell transplants.

[0910] Follicular lymphoma a type of non-Hodgkin lymphoma and is a lymphoma of follicle center B-cells (centrocytes and centroblasts), which has at least a partially follicular pattern. Follicular lymphoma cells express the B-cell markers CD10, CD19, CD20, and CD22. Follicular lymphoma cells are commonly negative for CD5. Morphologically, a follicular lymphoma tumor is made up of follicles containing a mixture of centrocytes (also called cleaved follicle center cells or small cells) and centroblasts (also called large noncleaved follicle center cells or large cells). The follicles are surrounded by non-malignant cells, mostly T-cells. The follicles contain predominantly centrocytes with a minority of centroblasts. The World Health Organization (WHO) morphologically grades the disease as follows: grade 1 (<5 centroblasts per high-power field (hpf); grade 2 (6-15 centroblasts/hpf); grade 3 (>15 centroblasts/hpf). Grade 3 is further subdivided into the following grades: grade 3A (centrocytes still present); grade 3B (the follicles consist almost entirely of centroblasts). Treatment of follicular lymphoma includes chemotherapy, e.g., alkyating agents, nucleoside analogs, anthracycline-containing regimens, e.g., a combination therapy called CHOP-cyclophosphamide, doxorubicin, vincristine, prednisone/prednisolone, antibodies (e.g., rituximab), radioimmunotherapy, and hematopoietic stem cell transplantation.

[0911] CLL is a B-cell malignancy characterized by neoplastic cell proliferation and accumulation in bone morrow, blood, lymph nodes, and the spleen. The median age at time of diagnosis of CLL is about 65 years. Current treatments include chemotherapy, radiation therapy, biological therapy, or bone marrow transplantation. Sometimes symptoms are treated surgically (e.g., splenectomy removal of enlarged spleen) or by radiation therapy (e.g., de-bulking swollen lymph nodes). Chemotherapeutic agents to treat CLL include, e.g., fludarabine, 2-chlorodeoxyadenosine (cladribine), chlorambucil, vincristine, pentostatin, cyclophosphamide, alemtuzumab (Campath-1H), doxorubicin, and prednisone. Biological therapy for CLL includes antibodies, e.g., alemtuzumab, rituximab, and ofatumumab; as well as tyrosine kinase inhibitor therapies. A number of criteria can be used to classify stage of CLL, e.g., the Rai or Binet system. The Rai system describes CLL has having five stages: stage 0 where only lymphocytosis is present; stage I where lymphadenopathy is present; stage II where splenomegaly, lymphadenopathy, or both are present; stage III where anemia, organomegaly, or both are present (progression is defined by weight loss, fatigue, fever, massive organomegaly, and a rapidly increasing lymphocyte count); and stage IV where anemia, thrombocytopenia, organomegaly, or a combination thereof are present. Under the Binet staging system, there are three categories: stage A where lymphocytosis is present and less than three lymph nodes are enlarged (this stage is inclusive of all Rai stage 0 patients, one-half of Rai stage I patients, and one-third of Rai stage II patients); stage B where three or more lymph nodes are involved; and stage C wherein anemia or thrombocytopenia, or both are present. These classification systems can be combined with measurements of mutation of the immunoglobulin genes to provide a more accurate characterization of the state of the disease. The presence of mutated immunoglobulin genes correlates to improved prognosis.

[0912] In another embodiment, the CAR expressing cells of the present invention are used to treat cancers or leukemias, e.g., with leukemia stem cells. For example, the leukemia stem cells are CD34⁺/CD38⁻ leukemia cells.

[0913] In some embodiments, a CAR-expressing cell (e.g., CD19 CAR-expressing cell) described herein is used to deplete a B cell (e.g., a population of B cells, e.g., regulatory B cells). Without wishing to be bound by theory, it is believed that depletion of B cells, e.g., regulatory B cells, can improve the tumor microenvironment such that anti-cancer therapies (e.g., therapies described herein) can be more effective (e.g., than without depletion of the B cells). Thus, provided herein is a method for reducing, e.g., depleting, regulatory cells (e.g., regulatory B cells). The method includes administering a CAR-expressing cell (e.g., CD19 CAR-expressing cell) described herein in an amount sufficient to reduce the regulatory cells. In some embodiments, the methods can be used to modulate a tumor microenvironment, e.g., to enhance the effectiveness of a therapy described herein.

[0914] In some embodiments, a dose of CAR-expressing cells (e.g., CAR-expressing cells described herein, e.g., CD19 CAR-expressing cells described herein) comprises about 10⁴ to about 10⁹ cells/kg, e.g., about 10⁴ to about 10⁵ cells/kg, about 10⁵ to about 10⁶ cells/kg, about 10⁶ to about 10⁷ cells/kg, about 10⁷ to about 10⁸ cells/kg, or about 10⁸ to about 10⁹ cells/kg. In embodiments, the dose of CAR-expressing cells comprises about 0.6×10⁶ cells/kg to about 2×10⁷ cells/kg.

[0915] In some embodiments, a dose of CAR-expressing cells described herein (e.g., CD19 CAR-expressing cells) comprises about 2×10⁵, 1×10⁶, 1.1×10⁶, 2×10⁶, 3×10⁶, 3.6×10⁶, 5×10⁶, 1×10⁷, 1.8×10⁷,2×07, 5×10⁷, 1×10⁸, 2×10⁸, 3×10⁸, or 5×10⁸ cells/kg. In some embodiments, a dose of CAR cells (e.g., CD19 CAR-expressing cells) comprises at least about 1×10⁶,1.1×10⁶,2×10⁶,3.6×10⁶,5×10⁶,1×10⁷,1.8×10⁷, 2×10⁷, 5×10⁷,1×10⁸, 2×10⁸,3×10⁸, or 5×10⁸ cells/kg. In some embodiments, a dose of CAR cells (e.g., CD19 CAR-expressing cells) comprises up to about 1×10⁶, 1.1×10⁶, 2×10⁶, 3.6×10⁶, 5×10⁶, 1×10⁷, 1.8×10⁷, 2×10⁷, 5×10⁷, 1×10⁸, 2×10⁸, 3×10⁸, or 5×10⁸ cells/kg. In some embodiments, a dose of CAR cells (e.g., CD19 CAR-expressing cells) comprises about 1.1×10⁶-1.8×10⁷ cells/kg. In some embodiments, a dose of CAR cells (e.g., CD19 CAR-expressing cell) comprises about 1×10⁷, 2×10⁷, 5×10⁷, 1×10⁸, 2×10⁸, 3×10⁸, 5×10⁸, 1×10⁹, 2×10⁹, or 5×10⁹ cells. In some embodiments, a dose of CAR cells (e.g., e.g., CD19 CAR-expressing cells) comprises at least about 1×10⁷, 2×10⁷, 5×10⁷, 1×10⁸, 2×10⁸, 3×10⁸, 5×10⁸, 1×10⁹, 2×109, or 5×10⁹ cells. In some embodiments, a dose of CAR cells (e.g., e.g., CD19 CAR-expressing cells) comprises up to about 1×10⁷, 2×10⁷, 5×10⁷, 1×10⁸, 2×10⁸, 3×10⁸, 5×10⁸, 1×10⁹, 2×10⁹, or 5×10⁹ cells.

[0916] In some embodiments, a dose of CAR cells (e.g., CD19 CAR-expressing cells) comprises up to about 1×10⁷, 1.5×10⁷, 2×10⁷, 2.5×10⁷, 3×10⁷, 3.5×10⁷, 4×10⁷, 5×10⁷, 1×10⁸, 1.5×10⁸, 2×10⁸, 2.5×10⁸, 3×10⁸, 3.5×10⁸, 4×10⁸, 5×10⁸, 1×10⁹, 2×10⁹, or 5×10⁹ cells. In some embodiments, a dose of CAR cells (e.g., CD19 CAR-expressing cell) comprises up to about 1-3×10⁷ to 1-3×10⁸ cells. In some embodiments, the subject is administered about 1-3×10⁷ of CD19 CAR-expressing cells. In other embodiments, the subject is administered about 1-3×10⁸ of CD19 CAR-expressing cells.

[0917] In some embodiments, a dose of CAR-expressing cells (e.g., CAR-expressing cells described herein, e.g., CD19 CAR-expressing cells described herein) comprises about 1×10⁶ cells/m² to about 1×10⁹ cells/m², e.g., about 1×10⁷ cells/m² to about 5×10⁸ cells/m², e.g., about 1.5×10⁷ cells/m², about 2×10⁷ cells/m², about 4.5×10⁷ cells/m², about 10⁸ cells/m², about 1.2×10⁸ cells/m², or about 2×10⁸ cells/m².

### Selected Doses and Dosage Regimens

[0918] Accordingly, in one aspect, the invention pertains to a method of treating a subject (e.g., a mammal) having a cancer, comprising administering immune effector cells comprising a CAR molecule. In one embodiment, the immune effector cells are administered as a single dose, e.g., a single dose as described herein. In other embodiments the immune effector cells are administered as a plurality of doses, e.g., a first dose, a second dose, and optionally a third dose, e.g., as described herein.

[0919] In a related aspect, the invention pertains to a method of treating a subject (e.g., an adult subject) having a cancer (e.g., acute lymphoid leukemia (ALL)), comprising administering to the subject a a dose, e.g., a single dose, or a plurality of doses (e.g., a first dose, a second dose, and optionally one or more additional doses), each dose comprising immune effector cells expressing a CAR molecule, e.g., a CD19 CAR molecule, (e.g., a CAR molecule according to residues 22-486 of SEQ ID NO: 58) or a BCMA CAR molecule.

[0920] In yet another aspect, the invention pertains to a use of a single dose, or a plurality of doses (e.g., a first dose, a second dose, and optionally a third dose), of immune effector cells comprising a CAR molecule (e.g., a CD19 CAR molecule, (e.g., a CAR molecule according to residues 22-486 of SEQ ID NO: 58) or a BCMA CAR molecule), for treating a subject (e.g., an adult) having a cancer (e.g., acute lymphoid leukemia (ALL)).

[0921] In certain aspects, the invention features a method of treating a subject (e.g., a pediatric subject) having a cancer (e.g., ALL), comprising administering to the subject immune effector cells expressing a CAR molecule. The method comprises administering one of the following:

[0922] (i) administering a dose of 2-5×10⁶ viable CAR-expressing cells/kg, e.g., transduced viable T cells cells/kg, wherein the subject has a body mass of less than or equal to 50 kg;

[0923] (ii) administering a dose of 1.0-2.5 ×10 viable CAR-expressing cells, e.g., transduced viable T cells, wherein the subject has a body mass of at least 50 kg;

[0924] (iii) administering a dose of 0.2-5×10⁶ viable CAR-expressing cells/kg, e.g., transduced viable T cells/kg, wherein the subject has a body mass of less than or equal to 50 kg; or

[0925] (iv) administering a dose of 0.1-2.5 ×10 viable CAR-expressing cells, e.g., transduced viable T cells, wherein the subject has a body mass of at least 50 kg.

[0926] In embodiments, a single dose is administered to the subject, e.g., the pediatric subject. In embodiments, the CAR-expressing cell is a CD19 CAR-expressing cell, e.g., a cell expressing a CD19 CAR of any Tables 2 or 3 herein, e.g., CTL019 or CTL119.

[0927] In embodiments, the doses are administered on sequential days, e.g., the first dose is administered on day 1, the second dose is administered on day 2, and the optional third dose (if administered) is administered on day 3.

[0928] In embodiments, a fourth, fifth, or sixth dose, or more doses, are administered.

[0929] In embodiments, the first dose comprises about 10% of the total dose, the second dose comprises about 30% of the total dose, and the third dose comprises about 60% of the total dose, wherein the aforementioned percentages have a sum of 100%. In embodiments, the first dose comprises about 9-11%, 8-12%, 7-13%, or 5-15% of the total dose. In embodiments, the second dose comprises about 29-31%, 28-32%, 27-33%, 26-34%, 25-35%, 24-36%, 23-37%, 22-38%, 21-39%, or 20-40% of the total dose. In embodiments, the third dose comprises about 55-65%, 50-70%, 45-75%, or 40-80% of the total dose. In embodiments, the total dose refers to the total number of viable CAR-expressing cells administered over the course of 1 week, 2 weeks, 3 weeks, or 4 weeks. In some embodiments wherein two doses are administered, the total dose refers to the sum of the number of viable CAR-expressing cells administered to the subject in the first and second doses. In some embodiments wherein three doses are administered, the total dose refers to the sum of the number of viable CAR-expressing cells administered to the subject in the first, second, and third doses.

[0930] In embodiments, the dose is measured according to the number of viable CAR-expressing cells therein. CAR expression can be measured, e.g., by flow cytometry using an antibody molecule that binds the CAR molecule and a detectable label. Viability can be measured, e.g., by Cellometer.

[0931] In embodiments, the viable CAR-expressing cells are administered in ascending doses. In embodiments, the second dose is larger than the first dose, e.g., larger by 10%, 20%, 30%, or 50%. In embodiments, the second dose is twice, three times, four times, or five times the size of the first dose. In embodiments, the third dose is larger than the second dose, e.g., larger by 10%, 20%, 30%, or 50%. In embodiments, the third dose is twice, three times, four times, or five times the size of the second dose.

[0932] In certain embodiments, the method includes one, two, three, four, five, six, seven or all of a)-h) of the following:

[0933] a) the number of CAR-expressing, viable cells administered in the first dose is no more than 1/3, of the number of CAR-expressing, viable cells administered in the second dose;

[0934] b) the number of CAR-expressing, viable cells administered in the first dose is no more than 1/X, wherein X is 2, 3, 4, 5, 6, 7, 8, 9, 10, 15, 20, 30, 40 or 50, of the total number of CAR-expressing, viable cells administered;

[0935] c) the number of CAR-expressing, viable cells administered in the first dose is no more than 1×10⁷, 2×10⁷, 3×10⁷, 4×10⁷, 5×10⁷, 6×10⁷, 7×10⁷, 8×10⁷, 9×10⁷, 1×10, 2×10⁸, 3×10⁸, 4×10⁸, or 5×10⁸ CAR-expressing, viable cells, and the second dose is greater than the first dose;

[0936] d) the number of CAR-expressing, viable cells administered in the second dose is no more than 1/2, of the number of CAR-expressing, viable cells administered in the third dose;

[0937] e) the number of CAR-expressing, viable cells administered in the second dose is no more than 1/Y, wherein Y is 2, 3, 4, 5, 6, 7, 8, 9, 10, 15, 20, 30, 40 or 50, of the total number of CAR-expressing, viable cells administered;

[0938] f) the number of CAR-expressing, viable cells administered in the second dose is no more than 1×10⁷, 2×10⁷, 3×10⁷, 4×10⁷, 5×10⁷, 6×10⁷, 7×10⁷, 8×10⁷, 9×10⁷, 1×10⁸, 2×10⁸, 3×10⁸, 4×10⁸, or 5×10⁸ CAR-expressing, viable cells, and the third dose is greater than the second dose;

[0939] h) the dosages and time periods of administration of the first, second, and optionally third doses are selected such that the subject experiences CRS at a level no greater than 4, 3, 2, or 1.

[0940] In embodiments, the total dose is about 5×10⁸ CAR-expressing, viable cells. In embodiments, the total dose is about 5×10⁷-5×10⁸ CAR-expressing, viable cells. In embodiments, the first dose is about 5×10⁷ (e.g., ±10%, 20%, or 30%) CAR-expressing, viable cells, the second dose is about 1.5×10⁸ (e.g., ±10%, 20%, or 30%) CAR-expressing, viable cells, and the third dose is about 3×10⁸ (e.g., ±10%, 20%, or 30%) CAR-expressing, viable cells.

[0941] In embodiments, the method comprises administering, e.g., as a single dose or as a plurality of doses as described herein, a dose of 0.02-5×10⁶ viable CAR-expressing cells/kg, e.g., transduced viable T cells/kg, e.g., a dose of 0.02-5×10⁶, 0.03-5×10⁶, 0.04-5×10⁶, 0.05-5×10⁶, 0.06-5×10⁶, 0.07-5×10⁶, 0.08-5×10⁶, 0.09-5×10⁶, 0.10-5×10⁶, 0.11-5×10⁶, 0.12-5×10⁶, 0.13-5×10⁶, 0.14-5×10⁶, 0.15-5×10⁶, 0.16-5×10⁶, 0.17-5×10⁶, 0.18-5×10⁶, 0.19-5×10⁶, or 0.20-5×10⁶, wherein the subject has a body mass of less than or equal to 50 kg.

[0942] In embodiments, the method comprises administering, e.g., as a single dose or as a plurality of doses as described herein, a dose of 0.2-5×10⁶ viable CAR-expressing cells/kg, e.g., transduced viable T cells/kg, e.g., a dose of 0.2-5×10⁶, 0.3-5×10⁶, 0.4-5×10⁶, 0.5-5×10⁶, 0.6-5×10⁶, 0.7-5×10⁶, 0.8-5×10⁶, 0.9-5×10⁶, 1.0-5×10⁶, 1.1-5×10⁶, 1.2-5×10⁶, 1.3-5×10⁶, 1.4-5×10⁶, 1.5-5×10⁶, 1.6-5×10⁶, 1.7-5×10⁶, 1.8-5×10⁶, 1.9-5×10⁶, or 2-5×10⁶, wherein the subject has a body mass of less than or equal to 50 kg.

[0943] In embodiments, the method comprises administering, e.g., as a single dose or as a plurality of doses as described herein, a dose of 2-50×10⁶ viable CAR-expressing cells/kg, e.g., transduced viable T cells/kg, e.g., a dose of 2-5×10⁶, 2-10×10⁶, 2-15×10⁶, 2-20×10⁶, 2-25×10⁶, 2-30×10⁶, 2-35×10⁶, 2-40×10⁶, 2-45×10⁶, or 2-50×10⁶, wherein the subject has a body mass of less than or equal to 50 kg.

[0944] In embodiments, the method further comprises administering, e.g., as a single dose or as a plurality of doses as described herein, a dose of 0.2-50×10⁶ viable CAR-expressing cells/kg, e.g., transduced viable T cells/kg, e.g., a dose of 0.2-5×10⁶, 0.2-10×10⁶, 0.2-15×10⁶, 0.2-20×10⁶, 0.2-25×10⁶, 0.2-30×10⁶, 0.2-35×10⁶, 0.2-40×10⁶, 0.2-45×10⁶, or 0.2-50×10⁶, wherein the subject has a body mass of less than or equal to 50 kg.

[0945] In embodiments, the method comprises administering, e.g., as a single dose or as a plurality of doses as described herein, a dose of 0.02-50×10⁶ viable CAR-expressing cells/kg, e.g., transduced viable T cells/kg, e.g, a dose of 0.02-50×10⁶, 0.03-45×10⁶, 0.05-40×10⁶, 0.1-35×10⁶, 0.2-30×10⁶, 0.3-25×10⁶, 0.4-20×10⁶, 0.5-15×10⁶, 1-10×10⁶, 2-5×10⁶, wherein the subject has a body mass of less than or equal to 50 kg.

[0946] In embodiments, the method comprises administering, e.g., as a single dose or as a plurality of doses as described herein, a dose of 0.01-2.5×10⁸ viable CAR-expressing cells, e.g., transduced viable T cells, e.g., a dose of 0.01-2.5×10⁸, 0.02-2.5×10⁸, 0.03-2.5×10⁸, 0.04-2.5×10⁸, 0.05-2.5×10⁸, 0.06-2.5×10⁸, 0.07-2.5×10⁸, 0.08-2.5×10⁸, 0.09-2.5×10⁸, or 0.10-2.5×10⁸, wherein the subject has a body mass of at least 50 kg.

[0947] In embodiments, the method comprises administering, e.g., as a single dose or as a plurality of doses as described herein, a dose of 0.1-2.5×10⁸ viable CAR-expressing cells, e.g., transduced viable T cells, e.g., a dose of 0.1-2.5×10⁸, 0.2-2.5×10⁸, 0.3-2.5×10⁸, 0.4-2.5×10⁸, 0.5-2.5×10⁸, 0.6-2.5×10⁸, 0.7-2.5×10⁸, 0.8-2.5×10⁸, 0.9-2.5×10⁸, or 1.0-2.5×10⁸, wherein the subject has a body mass of at least 50 kg.

[0948] In embodiments, the method comprises administering, e.g., as a single dose or as a plurality of doses as described herein, a dose of 1-25×10⁸ viable CAR-expressing cells, e.g., transduced viable T cells/kg, e.g., a dose of 1-2.5×10⁸, 1-5×10⁸, 1-7.5×10⁸, 1-10×10⁸, 1-12.5×10⁸, 1-15×10⁸, 1-17.5×10⁸, 1-20×10⁸, 1-22.5×10⁸, or 1-25×10⁸, wherein the subject has a body mass of at least 50 kg.

[0949] In embodiments, the method comprises administering, e.g., as a single dose or as a plurality of doses as described herein, a dose of 0.1-2.5×10⁸ viable CAR-expressing cells, e.g., transduced viable T cells/kg, e.g., a dose of 0.1-2.5×10⁸, 0.1-5×10⁸, 0.1-7.5×10⁸, 0.1-10×10⁸, 0.1-12.5×10⁸, 0.1-15×10⁸, 0.1-17.5×10⁸, 0.1-20×10⁸, 0.1-22.5×10⁸, or 0.1-25×10⁸, wherein the subject has a body mass of at least 50 kg.

[0950] In embodiments, the method comprises administering, e.g., as a single dose or as a plurality of doses as described herein, a dose of 0.01-25 ×10 viable CAR-expressing cells, e.g., transduced viable T cells/kg, e.g., a dose of 0.01-25×10⁸, 0.05-22.5×10⁸, 0.1-20×10⁸, 0.2-17.5×10⁸, 0.5-15×10⁸, 0.6-12.5×10⁸, 0.7-10×10⁸, 0.8-7.5×10⁸, 0.9-5×10⁸, or 1-2.5×10⁸, wherein the subject has a body mass of at least 50 kg.

[0951] In any of the methods or compositions for use described herein, in some embodiments, a dose of CAR-expressing cells (e.g., CD19 CAR-expressing cells) comprises about 10⁴ to about 10⁹ cells/kg, e.g., about 10⁴ to about 10⁵ cells/kg, about 10⁵ to about 10⁶ cells/kg, about 10⁶ to about 10⁷ cells/kg, about 10⁷ to about 10⁸ cells/kg, or about 10⁸ to about 10⁹ cells/kg; or at least about one of: 1×10⁷, 1.5×10⁷, 2×10⁷, 2.5×10⁷, 3×10⁷, 3.5×10⁷, 4×10⁷, 5×10⁷, 1×10⁸, 1.5×10⁸, 2×10⁸, 2.5×10⁸, 3×10⁸, 3.5×10⁸, 4×10⁸, 5×10⁸, 1×10⁹, 2×10⁹, or 5×10⁹ cells. In some embodiments, a dose of CAR-expressing cells (e.g., CD19 CAR-expressing cells or BCMA CAR-expressing cells) comprises at least about 1-5×10⁷ to 1-5×10⁸ CAR-expressing cells In some embodiments, the subject is administered about 1-5×10⁷ CAR-expressing cells (e.g., CD19 CAR-expressing cells or BCMA CAR-expressing cells)). In other embodiments, the subject is administered about 1-5×10⁸ CAR-expressing cells (e.g., CD19 CAR-expressing cells or BCMA CAR-expressing cells)).

[0952] Any of the dose ranges disclosed herein is intended to include the upper and lower endpoint values specified. For example, a dose range of 1-5×10⁷ CAR-expressing cells includes a dose of 1×10⁷ CAR-expressing cells and 5×10⁷ CAR-expressing cells (unless explicitly noted otherwise).

### Combination Therapies

[0953] The combination of a CAR as described herein (e.g., a CD19 or BCMA CAR-expressing cell described herein e.g., and one or more B-cell inhibitors, e.g., as described herein) may be used in combination with other known agents and therapies.

[0954] A CAR-expressing cell described herein and/or the at least one additional therapeutic agent can be administered simultaneously, in the same or in separate compositions, or sequentially. For sequential administration, the CAR-expressing cell described herein can be administered first, and the additional agent can be administered second, or the order of administration can be reversed.

[0955] The CAR therapy and/or other therapeutic agents (such as a second CAR therapy), procedures or modalities can be administered during periods of active disorder, or during a period of remission or less active disease. The CAR therapy can be administered before the other treatment, concurrently with the treatment, post-treatment, or during remission of the disorder.

[0956] For instance, in some embodiments, CAR therapy is administered to a subject having a disease associated with CD19 or BCMA expression, e.g., a cancer. The subject can be assayed for indicators of responsiveness or relapse. In some embodiments, when the subject shows one or more signs of relapse, e.g., a frameshift and/or premature stop codon in CD19, an additional therapy is administered. In embodiments, the additional therapy is a B-cell inhibitor. The CD19 therapy may be continued (for instance, when there are still some CD19-expressing cancer cells detectable in the subject) or may be discontinued (for instance, when a risk-benefit analysis favors discontinuing the therapy).

[0957] When administered in combination, the CAR therapy and the additional agent (e.g., second or third agent), or all, can be administered in an amount or dose that is higher, lower or the same than the amount or dosage of each agent used individually, e.g., as a monotherapy. In certain embodiments, the administered amount or dosage of the CAR therapy, the additional agent (e.g., second or third agent), or all, is lower (e.g., at least 20%, at least 30%, at least 40%, or at least 50%) than the amount or dosage of each agent used individually, e.g., as a monotherapy. In other embodiments, the amount or dosage of the CAR therapy, the additional agent (e.g., second or third agent), or all, that results in a desired effect (e.g., treatment of cancer) is lower (e.g., at least 20%, at least 30%, at least 40%, or at least 50% lower) than the amount or dosage of each agent used individually, e.g., as a monotherapy, required to achieve the same therapeutic effect.

[0958] The one or more therapies described herein can be administered to the subject substantially at the same time or in any order. For instance, a CD19 inhibitor, e.g., a CD19 CAR-expressing cell described herein, the one or more B-cell inhibitor, and/or optionally the at least one additional therapeutic agent can be administered simultaneously, in the same or in separate compositions, or sequentially. Additional timings of administration, e.g., sequence of administration, are described in pages 4-15 of International Application WO 2016/164731, filed Apr. 8, 2016, which is incorporated by reference in its entirety

[0959] In embodiments, one or more of the therapeutics in the combination therapy is an antibody molecule. Cancer antigens can be targeted with monoclonal antibody therapy. Monoclonal antibody (mAb) therapy has been shown to exert powerful antitumor effects by multiple mechanisms, including complement-dependent cytotoxicity (CDC), antibody-dependent cellular cytotoxicity (ADCC) and direct cell inhibition or apoptosis-inducing effects on tumor cells that over-express the target molecules.

[0960] In further aspects, the combination of the CAR-expressing cell described herein may be used in a treatment regimen in combination with surgery, chemotherapy, radiation, an mTOR pathway inhibitor, immunosuppressive agents, such as cyclosporin, azathioprine, methotrexate, mycophenolate, and FK506, antibodies, or other immunoablative agents such as CAMPATH, anti-CD3 antibodies or other antibody therapies, cytoxin, fludarabine, cyclosporin, FK506, rapamycin, mycophenolic acid, steroids, FR901228, cytokines, and irradiation. peptide vaccine, such as that described in Izumoto et al. 2008 J Neurosurg 108:963-971.

[0961] In one embodiment, the CAR-expressing cell described herein (optionally in combination with a B-cell inhibitor) can be used in combination with a chemotherapeutic agent. Exemplary chemotherapeutic agents include an anthracycline (e.g., doxorubicin (e.g., liposomal doxorubicin)); a vinca alkaloid (e.g., vinblastine, vincristine, vindesine, vinorelbine); an alkylating agent (e.g., cyclophosphamide, decarbazine, melphalan, ifosfamide, temozolomide); an immune cell antibody (e.g., alemtuzamab, gemtuzumab, rituximab, tositumomab); an antimetabolite (including, e.g., folic acid antagonists, pyrimidine analogs, purine analogs and adenosine deaminase inhibitors (e.g., fludarabine)); a TNFR glucocorticoid induced TNFR related protein (GITR) agonist; a proteasome inhibitor (e.g., aclacinomycin A, gliotoxin or bortezomib); an immunomodulator such as thalidomide or a thalidomide derivative (e.g., lenalidomide).

[0962] General Chemotherapeutic agents considered for use in combination therapies include anastrozole (Arimidex®), bicalutamide (Casodex®), bleomycin sulfate (Blenoxane®), busulfan (Myleran®), busulfan injection (Busulfex®), capecitabine (Xeloda®), N4-pentoxycarbonyl-5-deoxy-5-fluorocytidine, carboplatin (Paraplatin®), carmustine (BiCNU®), chlorambucil (Leukeran®), cisplatin (Platinol®), cladribine (Leustatin®), cyclophosphamide (Cytoxan® or Neosar®), cytarabine, cytosine arabinoside (Cytosar-U®), cytarabine liposome injection (DepoCyt®), dacarbazine (DTIC-Dome), dactinomycin (Actinomycin D, Cosmegan), daunorubicin hydrochloride (Cerubidine®), daunorubicin citrate liposome injection (DaunoXome®), dexamethasone, docetaxel (Taxotere), doxorubicin hydrochloride (Adriamycin®, Rubex®), etoposide (Vepesid®), fludarabine phosphate (Fludara), 5-fluorouracil (Adrucil®, Efudex®), flutamide (Eulexin®), tezacitibine, gemcitabine (difluorodeoxycitidine), hydroxyurea (Hydrea), Idarubicin (Idamycin®), ifosfamide (IFEX®), irinotecan (Camptosar®), L-asparaginase (ELSPAR®), leucovorin calcium, melphalan (Alkeran®), 6-mercaptopurine (Purinethol®), methotrexate (Folex®), mitoxantrone (Novantrone®), mylotarg, paclitaxel (Taxol®), nab-paclitaxel (Abraxane®), phoenix (Yttrium90/MX-DTPA), pentostatin, polifeprosan 20 with carmustine implant (Gliadel®), tamoxifen citrate (Nolvadex®), teniposide (Vumon®), 6-thioguanine, thiotepa, tirapazamine (Tirazone®), topotecan hydrochloride for injection (Hycamptin®), vinblastine (Velban®), vincristine (Oncovin®), and vinorelbine (Navelbine®).

[0963] Treatment with a combination of a chemotherapeutic agent and a cell expressing a CAR molecule described herein can be used to treat a hematologic cancer described herein, e.g., AML. In embodiments, the combination of a chemotherapeutic agent and a CAR-expressing cell is useful for targeting, e.g., killing, cancer stem cells, e.g., leukemic stem cells, e.g., in subjects with AML. In embodiments, the combination of a chemotherapeutic agent and a CAR-expressing cell is useful for treating minimal residual disease (MRD). MRD refers to the small number of cancer cells that remain in a subject during treatment, e.g., chemotherapy, or after treatment. MRD is often a major cause for relapse. The present invention provides a method for treating cancer, e.g., MRD, comprising administering a chemotherapeutic agent in combination with a CAR-expressing cell, e.g., as described herein.

[0964] In an embodiment, the chemotherapeutic agent is administered prior to administration of the cell expressing a CAR molecule, e.g., a CAR molecule described herein. In chemotherapeutic regimens where more than one administration of the chemotherapeutic agent is desired, the chemotherapeutic regimen is initiated or completed prior to administration of a cell expressing a CAR molecule, e.g., a CAR molecule described herein. In embodiments, the chemotherapeutic agent is administered at least 1 day, 2 days, 3 days, 4 days, 5 days, 6 days, 7 days, 8 days, 9 days, 10 days, 11 days, 12 days, 13 days, 14 days, 15 days, 20 days, 25 days, or 30 days prior to administration of the cell expressing the CAR molecule. In embodiments, the chemotherapeutic regimen is initiated or completed at least 1 day, 2 days, 3 days, 4 days, 5 days, 6 days, 7 days, 8 days, 9 days, 10 days, 11 days, 12 days, 13 days, 14 days, 15 days, 20 days, 25 days, or 30 days prior to administration of the cell expressing the CAR molecule.

[0965] Anti-cancer agents of particular interest for combinations with the compounds of the present invention include: antimetabolites; drugs that inhibit either the calcium dependent phosphatase calcineurin or the p70S6 kinase FK506) or inhibit the p70S6 kinase; alkylating agents; mTOR inhibitors; immunomodulators; anthracyclines; vinca alkaloids; proteosome inhibitors; GITR agonists; protein tyrosine phosphatase inhibitors; a CDK4 kinase inhibitor; a BTK kinase inhibitor; a MKN kinase inhibitor; a DGK kinase inhibitor; or an oncolytic virus.

[0966] Exemplary antimetabolites include, without limitation, folic acid antagonists (also referred to herein as antifolates), pyrimidine analogs, purine analogs and adenosine deaminase inhibitors): methotrexate (Rheumatrex, Trexall), 5-fluorouracil (Adrucil®, Efudex®, Fluoroplex®), floxuridine (FUDF®), cytarabine (Cytosar-U®, Tarabine PFS), 6-mercaptopurine (Puri-Nethol®)), 6-thioguanine (Thioguanine Tabloid®), fludarabine phosphate (Fludara®), pentostatin (Nipent®), pemetrexed (Alimta®), raltitrexed (Tomudex®), cladribine (Leustatin®), clofarabine (Clofarex®, Clolar®), mercaptopurine (Puri-Nethol®), capecitabine (Xeloda®), nelarabine (Arranon®), azacitidine (Vidaza®) and gemcitabine (Gemzar®). Preferred antimetabolites include, e.g., 5-fluorouracil (Adrucil®, Efudex®, Fluoroplex®), floxuridine (FUDF®), capecitabine (Xeloda®), pemetrexed (Alimta®), raltitrexed (Tomudex®) and gemcitabine (Gemzar®).

[0967] Exemplary alkylating agents include, without limitation, nitrogen mustards, ethylenimine derivatives, alkyl sulfonates, nitrosoureas and triazenes): uracil mustard (Aminouracil Mustard®, Chlorethaminacil®, Demethyldopan®, Desmethyldopan®, Haemanthamine®, Nordopan®, Uracil nitrogen Mustard®, Uracillost®, Uracilmostaza®, Uramustin®, Uramustine), chlormethine (Mustargen®), cyclophosphamide (Cytoxan®, Neosar®, Clafen®, Endoxan®, Procytox®, Revimmune™), ifosfamide (Mitoxana), melphalan (Alkeran®), Chlorambucil (Leukeran®), pipobroman (Amedel®, Vercyte®), triethylenemelamine (Hemel®, Hexalen®, Hexastat), triethylenethiophosphoramine, Temozolomide (Temodar®), thiotepa (Thioplex®), busulfan (Busilvex®, Myleran®), carmustine (BiCNU®), lomustine (CeeNU®), streptozocin (Zanosar®), and Dacarbazine (DTIC-Dome®). Additional exemplary alkylating agents include, without limitation, Oxaliplatin (Eloxatin®); Temozolomide (Temodar® and Temodal); Dactinomycin (also known as actinomycin-D, Cosmegen®); Melphalan (also known as L-PAM, L-sarcolysin, and phenylalanine mustard, Alkeran®); Altretamine (also known as hexamethylmelamine (HMM), Hexalen®); Carmustine (BiCNU®); Bendamustine (Treanda); Busulfan (Busulfex® and Myleran®); Carboplatin (Paraplatin®); Lomustine (also known as CCNU, CeeNU®); Cisplatin (also known as CDDP, Platinol® and Platinol®-AQ); Chlorambucil (Leukeran®); Cyclophosphamide (Cytoxan® and Neosar®); Dacarbazine (also known as DTIC, DIC and imidazole carboxamide, DTIC-Dome®); Altretamine (also known as hexamethylmelamine (HMM), Hexalen®); Ifosfamide (Ifex®); Prednumustine; Procarbazine (Matulane); Mechlorethamine (also known as nitrogen mustard, mustine and mechloroethamine hydrochloride, Mustargen); Streptozocin (Zanosar®); Thiotepa (also known as thiophosphoamide, TESPA and TSPA, Thioplex®); Cyclophosphamide (Endoxan®, Cytoxan®, Neosar®, Procytox®, Revimmune); and Bendamustine HCl (Treanda®).

[0968] In embodiments, a CAR-expressing cell described herein is administered to a subject in combination with fludarabine, cyclophosphamide, and/or rituximab. In embodiments, a CAR-expressing cell described herein is administered to a subject in combination with fludarabine, cyclophosphamide, and rituximab (FCR). In embodiments, the subject has CLL. For example, the subject has a deletion in the short arm of chromosome 17 (del(17p), e.g., in a leukemic cell). In other examples, the subject does not have a del(17p). In embodiments, the subject comprises a leukemic cell comprising a mutation in the immunoglobulin heavy-chain variable-region (IgV_{H}) gene. In other embodiments, the subject does not comprise a leukemic cell comprising a mutation in the immunoglobulin heavy-chain variable-region (IgV_{H}) gene. In embodiments, the fludarabine is administered at a dosage of about 10-50 mg/m2 (e.g., about 10-15, 15-20, 20-25, 25-30, 30-35, 35-40, 40-45, or 45-50 mg/m²), e.g., intravenously. In embodiments, the cyclophosphamide is administered at a dosage of about 200-300 mg/m2 (e.g., about 200-225, 225-250, 250-275, or 275-300 mg/m²), e.g., intravenously. In embodiments, the rituximab is administered at a dosage of about 400-600 mg/m2 (e.g., 400-450, 450-500, 500-550, or 550-600 mg/m²), e.g., intravenously.

[0969] In embodiments, a CAR-expressing cell described herein is administered to a subject in combination with bendamustine and rituximab. In embodiments, the subject has CLL. For example, the subject has a deletion in the short arm of chromosome 17 (del(17p), e.g., in a leukemic cell). In other examples, the subject does not have a del(17p). In embodiments, the subject comprises a leukemic cell comprising a mutation in the immunoglobulin heavy-chain variable-region (IgV_{H}) gene. In other embodiments, the subject does not comprise a leukemic cell comprising a mutation in the immunoglobulin heavy-chain variable-region (IgV_{H}) gene. In embodiments, the bendamustine is administered at a dosage of about 70-110 mg/m2 (e.g., 70-80, 80-90, 90-100, or 100-110 mg/m2), e.g., intravenously. In embodiments, the rituximab is administered at a dosage of about 400-600 mg/m2 (e.g., 400-450, 450-500, 500-550, or 550-600 mg/m²), e.g., intravenously.

[0970] In embodiments, a CAR-expressing cell described herein is administered to a subject in combination with rituximab, cyclophosphamide, doxorubicine, vincristine, and/or a corticosteroid (e.g., prednisone). In embodiments, a CAR-expressing cell described herein is administered to a subject in combination with rituximab, cyclophosphamide, doxorubicine, vincristine, and prednisone (R-CHOP). In embodiments, the subject has diffuse large B-cell lymphoma (DLBCL). In embodiments, the subject has nonbulky limited-stage DLBCL (e.g., comprises a tumor having a size/diameter of less than 7 cm). In embodiments, the subject is treated with radiation in combination with the R-CHOP. For example, the subject is administered R-CHOP (e.g., 1-6 cycles, e.g., 1, 2, 3, 4, 5, or 6 cycles of R-CHOP), followed by radiation. In some cases, the subject is administered R-CHOP (e.g., 1-6 cycles, e.g., 1, 2, 3, 4, 5, or 6 cycles of R-CHOP) following radiation.

[0971] In embodiments, a CAR-expressing cell described herein is administered to a subject in combination with etoposide, prednisone, vincristine, cyclophosphamide, doxorubicin, and/or rituximab. In embodiments, a CAR-expressing cell described herein is administered to a subject in combination with etoposide, prednisone, vincristine, cyclophosphamide, doxorubicin, and rituximab (EPOCH-R). In embodiments, a CAR-expressing cell described herein is administered to a subject in combination with dose-adjusted EPOCH-R (DA-EPOCH-R). In embodiments, the subject has a B cell lymphoma, e.g., a Myc-rearranged aggressive B cell lymphoma.

[0972] In embodiments, a CAR-expressing cell described herein is administered to a subject in combination with rituximab and/or lenalidomide. Lenalidomide ((RS)-3-(4-Amino-1-oxo 1,3-dihydro-2H-isoindol-2-yl)piperidine-2,6-dione) is an immunomodulator. In embodiments, a CAR-expressing cell described herein is administered to a subject in combination with rituximab and lenalidomide. In embodiments, the subject has follicular lymphoma (FL) or mantle cell lymphoma (MCL). In embodiments, the subject has FL and has not previously been treated with a cancer therapy. In embodiments, lenalidomide is administered at a dosage of about 10-20 mg (e.g., 10-15 or 15-20 mg), e.g., daily. In embodiments, rituximab is administered at a dosage of about 350-550 mg/m² (e.g., 350-375, 375-400, 400-425, 425-450, 450-475, or 475-500 mg/m²), e.g., intravenously.

[0973] Exemplary mTOR inhibitors include, e.g., temsirolimus; ridaforolimus (formally known as deferolimus, (1R,2R,4S)-4-[(2R)-2 [(1R,9S,12S,15R,16E,18R,19R,21R,23S,24E,26E,28Z,30S,32S,35R)-1,18-dihydroxy-19,30-dimethoxy-15,17,21,23, 29,35-hexamethyl-2,3,10,14,20-pentaoxo-11,36-dioxa-4-azatricyclo[30.3.1.0^{4,9}] hexatriaconta-16,24,26,28-tetraen-12-yl]propyl]-2-methoxycyclohexyl dimethylphosphinate, also known as AP23573 and MK8669, and described in PCT Publication No. WO 03/064383); everolimus (Afinitor® or RAD001); rapamycin (AY22989, Sirolimus®); simapimod (CAS 164301-51-3); emsirolimus, (5-{2,4-Bis[(3S)-3-methylmorpholin-4-yl]pyrido[2,3-d]pyrimidin-7-yl}-2-methoxyphenyl)methanol (AZD8055); 2-Amino-8-[trans-4-(2-hydroxyethoxy)cyclohexyl]-6-(6-methoxy-3-pyridinyl)-4-methyl-pyrido[2,3-d]pyrimidin-7(8H)-one (PF04691502, CAS 1013101-36-4); and N²-[1,4-dioxo-4-[[4-(4-oxo-8-phenyl-4H-1-benzopyran-2-yl)morpholinium-4-yl]methoxy]butyl]-L-arginylglycyl-L-α-aspartylL-serine-, inner salt (SF1126, CAS 936487-67-1) (SEQ ID NO: 1316), and XL765.

[0974] Exemplary immunomodulators include, e.g., afutuzumab (available from Roche®); pegfilgrastim (Neulasta); lenalidomide (CC-5013, Revlimid®); thalidomide (Thalomid®), actimid (CC4047); and IRX-2 (mixture of human cytokines including interleukin 1, interleukin 2, and interferon γ, CAS 951209-71-5, available from IRX Therapeutics).

[0975] Exemplary anthracyclines include, e.g., doxorubicin (Adriamycin® and Rubex®); bleomycin (Lenoxane®); daunorubicin (dauorubicin hydrochloride, daunomycin, and rubidomycin hydrochloride, Cerubidine); daunorubicin liposomal (daunorubicin citrate liposome, DaunoXome®); mitoxantrone (DHAD, Novantrone); epirubicin (Ellence™); idarubicin (Idamycin®, Idamycin PFS®); mitomycin C (Mutamycin®); geldanamycin; herbimycin; ravidomycin; and desacetylravidomycin.

[0976] Exemplary vinca alkaloids include, e.g., vinorelbine tartrate (Navelbine®), Vincristine (Oncovin®), and Vindesine (Eldisine®)); vinblastine (also known as vinblastine sulfate, vincaleukoblastine and VLB, Alkaban-AQ® and Velban®); and vinorelbine (Navelbine®).

[0977] Exemplary proteosome inhibitors include bortezomib (Velcade); carfilzomib (PX-171-007, (S)-4-Methyl-N—((S)-1-(((S)-4-methyl-1-((R)-2-methyloxiran-2-yl)-1-oxopentan-2-yl)amino)-1-oxo-3-phenylpropan-2-yl)-2-((S)-2-(2-morpholinoacetamido)-4-phenylbutanamido)-pentanamide); marizomib (NPI-0052); ixazomib citrate (MLN-9708); delanzomib (CEP-18770); and O-Methyl-N-[(2-methyl-5-thiazolyl)carbonyl]-L-seryl-O-methyl-N-[(1S)-2-[(2R)-2-methyl-2-oxiranyl]-2-oxo-1-(phenylmethyl)ethyl]-L-serinamide (ONX-0912).

[0978] In embodiments, a CAR-expressing cell described herein is administered to a subject in combination with brentuximab. Brentuximab is an antibody-drug conjugate of anti-CD30 antibody and monomethyl auristatin E. In embodiments, the subject has Hodgkin's lymphoma (HL), e.g., relapsed or refractory HL. In embodiments, the subject comprises CD30+ HL. In embodiments, the subject has undergone an autologous stem cell transplant (ASCT). In embodiments, the subject has not undergone an ASCT. In embodiments, brentuximab is administered at a dosage of about 1-3 mg/kg (e.g., about 1-1.5, 1.5-2, 2-2.5, or 2.5-3 mg/kg), e.g., intravenously, e.g., every 3 weeks.

[0979] In embodiments, a CAR-expressing cell described herein is administered to a subject in combination with brentuximab and dacarbazine or in combination with brentuximab and bendamustine. Dacarbazine is an alkylating agent with a chemical name of 5-(3,3-Dimethyl-1-triazenyl)imidazole-4-carboxamide. Bendamustine is an alkylating agent with a chemical name of 4-[5-[Bis(2-chloroethyl)amino]-1-methylbenzimidazol-2-yl]butanoic acid. In embodiments, the subject has Hodgkin's lymphoma (HL). In embodiments, the subject has not previously been treated with a cancer therapy. In embodiments, the subject is at least 60 years of age, e.g., 60, 65, 70, 75, 80, 85, or older. In embodiments, dacarbazine is administered at a dosage of about 300-450 mg/m² (e.g., about 300-325, 325-350, 350-375, 375-400, 400-425, or 425-450 mg/m²), e.g., intravenously. In embodiments, bendamustine is administered at a dosage of about 75-125 mg/m2 (e.g., 75-100 or 100-125 mg/m², e.g., about 90 mg/m²), e.g., intravenously. In embodiments, brentuximab is administered at a dosage of about 1-3 mg/kg (e.g., about 1-1.5, 1.5-2, 2-2.5, or 2.5-3 mg/kg), e.g., intravenously, e.g., every 3 weeks.

[0980] In some embodiments, a CAR-expressing cell described herein is administered to a subject in combination with a CD20 inhibitor, e.g., an anti-CD20 antibody (e.g., an anti-CD20 mono- or bispecific antibody) or a fragment thereof. Exemplary anti-CD20 antibodies include but are not limited to rituximab, ofatumumab, ocrelizumab, veltuzumab, obinutuzumab, TRU-015 (Trubion Pharmaceuticals), ocaratuzumab, and Prol31921 (Genentech). See, e.g., Lim et al. Haematologica. 95.1(2010):135-43.

[0981] In some embodiments, the anti-CD20 antibody comprises rituximab. Rituximab is a chimeric mouse/human monoclonal antibody IgG1 kappa that binds to CD20 and causes cytolysis of a CD20 expressing cell, e.g., as described in www.accessdata.fda.gov/drugsatfda_docs/label/2010/103705s53111bl.pdf. In embodiments, a CAR-expressing cell described herein is administered to a subject in combination with rituximab. In embodiments, the subject has CLL or SLL.

[0982] In some embodiments, rituximab is administered intravenously, e.g., as an intravenous infusion. For example, each infusion provides about 500-2000 mg (e.g., about 500-550, 550-600,600-650, 650-700, 700-750, 750-800, 800-850, 850-900, 900-950, 950-1000, 1000-1100, 1100-1200, 1200-1300, 1300-1400, 1400-1500, 1500-1600, 1600-1700, 1700-1800, 1800-1900, or 1900-2000 mg) of rituximab. In some embodiments, rituximab is administered at a dose of 150 mg/m² to 750 mg/m², e.g., about 150-175 mg/m², 175-200 mg/m², 200-225 mg/m², 225-250 mg/m², 250-300 mg/m², 300-325 mg/m², 325-350 mg/m², 350-375 mg/m², 375-400 mg/m², 400-425 mg/m², 425-450 mg/m², 450-475 mg/m², 475-500 mg/m², 500-525 mg/m², 525-550 mg/m², 550-575 mg/m², 575-600 mg/m², 600-625 mg/m², 625-650 mg/m², 650-675 mg/m², or 675-700 mg/m², where m² indicates the body surface area of the subject. In some embodiments, rituximab is administered at a dosing interval of at least 4 days, e.g., 4, 7, 14, 21, 28, 35 days, or more. For example, rituximab is administered at a dosing interval of at least 0.5 weeks, e.g., 0.5, 1, 2, 3, 4, 5, 6, 7, 8 weeks, or more. In some embodiments, rituximab is administered at a dose and dosing interval described herein for a period of time, e.g., at least 2 weeks, e.g., at least 2, 3, 4, 5, 6, 7, 8, 9, 10, 11, 12, 13, 14, 15, 16, 17, 18, 19, 20 weeks, or greater. For example, rituximab is administered at a dose and dosing interval described herein for a total of at least 4 doses per treatment cycle (e.g., at least 4, 5, 6, 7, 8, 9, 10, 11, 12, 13, 14, 15, 16, or more doses per treatment cycle).

[0983] In some embodiments, the anti-CD20 antibody comprises ofatumumab. Ofatumumab is an anti-CD20 IgG1κ human monoclonal antibody with a molecular weight of approximately 149 kDa. For example, ofatumumab is generated using transgenic mouse and hybridoma technology and is expressed and purified from a recombinant murine cell line (NSO). See, e.g., www.accessdata.fda.gov/drugsatfda_docs/label/2009/125326lbl.pdf; and Clinical Trial Identifier number NCT01363128, NCT01515176, NCT01626352, and NCT01397591. In embodiments, a CAR-expressing cell described herein is administered to a subject in combination with ofatumumab. In embodiments, the subject has CLL or SLL.

[0984] In some embodiments, ofatumumab is administered as an intravenous infusion. For example, each infusion provides about 150-3000 mg (e.g., about 150-200, 200-250, 250-300, 300-350, 350-400, 400-450, 450-500, 500-550, 550-600, 600-650, 650-700, 700-750, 750-800, 800-850, 850-900, 900-950, 950-1000, 1000-1200, 1200-1400, 1400-1600, 1600-1800, 1800-2000, 2000-2200, 2200-2400, 2400-2600, 2600-2800, or 2800-3000 mg) of ofatumumab. In embodiments, ofatumumab is administered at a starting dosage of about 300 mg, followed by 2000 mg, e.g., for about 11 doses, e.g., for 24 weeks. In some embodiments, ofatumumab is administered at a dosing interval of at least 4 days, e.g., 4, 7, 14, 21, 28, 35 days, or more. For example, ofatumumab is administered at a dosing interval of at least 1 week, e.g., 1, 2, 3, 4, 5, 6, 7, 8, 9, 10, 11, 12, 24, 26, 28, 20, 22, 24, 26, 28, 30 weeks, or more. In some embodiments, ofatumumab is administered at a dose and dosing interval described herein for a period of time, e.g., at least 1 week, e.g., 1, 2, 3, 4, 5, 6, 7, 8, 9, 10, 11, 12, 13, 14, 15, 16, 17, 18, 19, 20, 22, 24, 26, 28, 30, 40, 50, 60 weeks or greater, or 1, 2, 3, 4, 5, 6, 7, 8, 9, 10, 11, 12 months or greater, or 1, 2, 3, 4, 5 years or greater. For example, ofatumumab is administered at a dose and dosing interval described herein for a total of at least 2 doses per treatment cycle (e.g., at least 2, 3, 4, 5, 6, 7, 8, 9, 10, 11, 12, 13, 14, 15, 16, 18, 20, or more doses per treatment cycle).

[0985] In some cases, the anti-CD20 antibody comprises ocrelizumab. Ocrelizumab is a humanized anti-CD20 monoclonal antibody, e.g., as described in Clinical Trials Identifier Nos. NCT00077870, NCT01412333, NCT00779220, NCT00673920, NCT01194570, and Kappos et al. Lancet. 19.378(2011):1779-87.

[0986] In some cases, the anti-CD20 antibody comprises veltuzumab. Veltuzumab is a humanized monoclonal antibody against CD20. See, e.g., Clinical Trial Identifier No. NCT00547066, NCT00546793, NCT01101581, and Goldenberg et al. Leuk Lymphoma. 51(5)(2010):747-55.

[0987] In some cases, the anti-CD20 antibody comprises GA101. GA101 (also called obinutuzumab or RO5072759) is a humanized and glyco-engineered anti-CD20 monoclonal antibody. See, e.g., Robak. Curr. Opin. Investig. Drugs. 10.6(2009):588-96; Clinical Trial Identifier Numbers: NCT01995669, NCT01889797, NCT02229422, and NCT01414205; and www.accessdata.fda.gov/drugsatfda_docs/label/2013/125486s0001bl.pdf.

[0988] In some cases, the anti-CD20 antibody comprises AME-133v. AME-133v (also called LY2469298 or ocaratuzumab) is a humanized IgG1 monoclonal antibody against CD20 with increased affinity for the FcγRIIIa receptor and an enhanced antibody dependent cellular cytotoxicity (ADCC) activity compared with rituximab. See, e.g., Robak et al. BioDrugs 25.1(2011):13-25; and Forero-Torres et al. Clin Cancer Res. 18.5(2012):1395-403.

[0989] In some cases, the anti-CD20 antibody comprises PRO131921. PRO131921 is a humanized anti-CD20 monoclonal antibody engineered to have better binding to FcγRIIIa and enhanced ADCC compared with rituximab. See, e.g., Robak et al. BioDrugs 25.1(2011):13-25; and Casulo et al. Clin Immunol. 154.1(2014):37-46; and Clinical Trial Identifier No. NCT00452127.

[0990] In some cases, the anti-CD20 antibody comprises TRU-015. TRU-015 is an anti-CD20 fusion protein derived from domains of an antibody against CD20. TRU-015 is smaller than monoclonal antibodies, but retains Fc-mediated effector functions. See, e.g., Robak et al. BioDrugs 25.1(2011):13-25. TRU-015 contains an anti-CD20 single-chain variable fragment (scFv) linked to human IgG1 hinge, CH2, and CH3 domains but lacks CH1 and CL domains.

[0991] In some embodiments, an anti-CD20 antibody described herein is conjugated or otherwise bound to a therapeutic agent, e.g., a chemotherapeutic agent (e.g., cytoxan, fludarabine, histone deacetylase inhibitor, demethylating agent, peptide vaccine, anti-tumor antibiotic, tyrosine kinase inhibitor, alkylating agent, anti-microtubule or anti-mitotic agent), anti-allergic agent, anti-nausea agent (or anti-emetic), pain reliever, or cytoprotective agent described herein.

[0992] In embodiments, a CAR-expressing cell described herein is administered to a subject in combination with a B-cell lymphoma 2 (BCL-2) inhibitor (e.g., venetoclax, also called ABT-199 or GDC-0199;) and/or rituximab. In embodiments, a CAR-expressing cell described herein is administered to a subject in combination with venetoclax and rituximab. Venetoclax is a small molecule that inhibits the anti-apoptotic protein, BCL-2. Venetoclax has the following chemical name (4-(4-{[2-(4-chlorophenyl)-4,4-dimethylcyclohex-1-en-1-yl]methyl}piperazin-1-yl)-N-({3-nitro-4-[(tetrahydro-2H-pyran-4-ylmethyl)amino]phenyl}sulfonyl)-2-(1H-pyrrolo[2,3-b]pyridin-5-yloxy)benzamide).

[0993] In embodiments, the subject has CLL. In embodiments, the subject has relapsed CLL, e.g., the subject has previously been administered a cancer therapy. In embodiments, venetoclax is administered at a dosage of about 15-600 mg (e.g., 15-20, 20-50, 50-75, 75-100, 100-200, 200-300, 300-400, 400-500, or 500-600 mg), e.g., daily. In embodiments, rituximab is administered at a dosage of about 350-550 mg/m2 (e.g., 350-375, 375-400, 400-425, 425-450, 450-475, or 475-500 mg/m2), e.g., intravenously, e.g., monthly.

[0994] In some embodiments, one or more CAR-expressing cells described herein is administered in combination with an oncolytic virus. In embodiments, oncolytic viruses are capable of selectively replicating in and triggering the death of or slowing the growth of a cancer cell. In some cases, oncolytic viruses have no effect or a minimal effect on non-cancer cells. An oncolytic virus includes but is not limited to an oncolytic adenovirus, oncolytic Herpes Simplex Viruses, oncolytic retrovirus, oncolytic parvovirus, oncolytic vaccinia virus, oncolytic Sinbis virus, oncolytic influenza virus, or oncolytic RNA virus (e.g., oncolytic reovirus, oncolytic Newcastle Disease Virus (NDV), oncolytic measles virus, or oncolytic vesicular stomatitis virus (VSV)).

[0995] In some embodiments, the oncolytic virus is a virus, e.g., recombinant oncolytic virus, described in US2010/0178684 A1, which is incorporated herein by reference in its entirety. In some embodiments, a recombinant oncolytic virus comprises a nucleic acid sequence (e.g., heterologous nucleic acid sequence) encoding an inhibitor of an immune or inflammatory response, e.g., as described in US2010/0178684 A1, incorporated herein by reference in its entirety. In embodiments, the recombinant oncolytic virus, e.g., oncolytic NDV, comprises a pro-apoptotic protein (e.g., apoptin), a cytokine (e.g., GM-CSF, interferon-gamma, interleukin-2 (IL-2), tumor necrosis factor-alpha), an immunoglobulin (e.g., an antibody against ED-B firbonectin), tumor associated antigen, a bispecific adapter protein (e.g., bispecific antibody or antibody fragment directed against NDV HN protein and a T cell co-stimulatory receptor, such as CD3 or CD28; or fusion protein between human IL-2 and single chain antibody directed against NDV HN protein). See, e.g., Zamarin et al. Future Microbiol. 7.3(2012):347-67, incorporated herein by reference in its entirety. In some embodiments, the oncolytic virus is a chimeric oncolytic NDV described in U.S. Pat. No. 8,591,881 B2, US 2012/0122185 A1, or US 2014/0271677 A1, each of which is incorporated herein by reference in their entireties.

[0996] In some embodiments, the oncolytic virus comprises a conditionally replicative adenovirus (CRAd), which is designed to replicate exclusively in cancer cells. See, e.g., Alemany et al. Nature Biotechnol. 18(2000):723-27. In some embodiments, an oncolytic adenovirus comprises one described in Table 1 on page 725 of Alemany et al., incorporated herein by reference in its entirety.

[0997] Exemplary oncolytic viruses include but are not limited to the following:

[0998] Group B Oncolytic Adenovirus (ColoAdl) (PsiOxus Therapeutics Ltd.) (see, e.g., Clinical Trial Identifier: NCT02053220);

[0999] ONCOS-102 (previously called CGTG-102), which is an adenovirus comprising granulocyte-macrophage colony stimulating factor (GM-CSF) (Oncos Therapeutics) (see, e.g., Clinical Trial Identifier: NCT01598129);

[1000] VCN-01, which is a genetically modified oncolytic human adenovirus encoding human PH20 hyaluronidase (VCN Biosciences, S.L.) (see, e.g., Clinical Trial Identifiers: NCT02045602 and NCT02045589);

[1001] Conditionally Replicative Adenovirus ICOVIR-5, which is a virus derived from wild-type human adenovirus serotype 5 (Had5) that has been modified to selectively replicate in cancer cells with a deregulated retinoblastoma/E2F pathway (Institut Catala d'Oncologia) (see, e.g., Clinical Trial Identifier: NCT01864759);

[1002] Celyvir, which comprises bone marrow-derived autologous mesenchymal stem cells (MSCs) infected with ICOVIR5, an oncolytic adenovirus (Hospital Infantil Universitario Nino Jesns, Madrid, Spain/Ramon Alemany) (see, e.g., Clinical Trial Identifier: NCT01844661);

[1003] CG0070, which is a conditionally replicating oncolytic serotype 5 adenovirus (Ad5) in which human E2F-1 promoter drives expression of the essential Ela viral genes, thereby restricting viral replication and cytotoxicity to Rb pathway-defective tumor cells (Cold Genesys, Inc.) (see, e.g., Clinical Trial Identifier: NCT02143804); or

[1004] DNX-2401 (formerly named Delta-24-RGD), which is an adenovirus that has been engineered to replicate selectively in retinoblastoma (Rb)-pathway deficient cells and to infect cells that express certain RGD-binding integrins more efficiently (Clinica Universidad de Navarra, Universidad de Navarra/DNAtrix, Inc.) (see, e.g., Clinical Trial Identifier: NCT01956734).

[1005] In some embodiments, an oncolytic virus described herein is administering by injection, e.g., subcutaneous, intra-arterial, intravenous, intramuscular, intrathecal, or intraperitoneal injection. In embodiments, an oncolytic virus described herein is administered intratumorally, transdermally, transmucosally, orally, intranasally, or via pulmonary administration.

[1006] In an embodiment, cells expressing a CAR described herein are administered to a subject in combination with a molecule that decreases the Treg cell population. Methods that decrease the number of (e.g., deplete) Treg cells are known in the art and include, e.g., CD25 depletion, cyclophosphamide administration, modulating GITR function. Without wishing to be bound by theory, it is believed that reducing the number of Treg cells in a subject prior to apheresis or prior to administration of a CAR-expressing cell described herein reduces the number of unwanted immune cells (e.g., Tregs) in the tumor microenvironment and reduces the subject's risk of relapse.

[1007] In an embodiment, a CAR-expressing cell described herein is administered to a subject in combination with a molecule that decreases the Treg cell population. Methods that decrease the number of (e.g., deplete) Treg cells are known in the art and include, e.g., CD25 depletion, cyclophosphamide administration, and modulating GITR function. Without wishing to be bound by theory, it is believed that reducing the number of Treg cells in a subject prior to apheresis or prior to administration of a CAR-expressing cell described herein reduces the number of unwanted immune cells (e.g., Tregs) in the tumor microenvironment and reduces the subject's risk of relapse. In one embodiment, CAR-expressing cells described herein are administered to a subject in combination with a molecule targeting GITR and/or modulating GITR functions, such as a GITR agonist and/or a GITR antibody that depletes regulatory T cells (Tregs). In one embodiment, CAR-expressing cells described herein are administered to a subject in combination with cyclophosphamide. In one embodiment, the GITR binding molecule and/or molecule modulating GITR function (e.g., GITR agonist and/or Treg depleting GITR antibodies) is administered prior to the CAR-expressing cells. For example, in one embodiment, the GITR agonist can be administered prior to apheresis of the cells. In embodiments, cyclophosphamide is administered to the subject prior to administration (e.g., infusion or re-infusion) of the CAR-expressing cell or prior to apheresis of the cells. In embodiments, cyclophosphamide and an anti-GITR antibody are administered to the subject prior to administration (e.g., infusion or re-infusion) of the CAR-expressing cell or prior to apheresis of the cells. In one embodiment, the subject has cancer (e.g., a solid cancer or a hematological cancer such as ALL or CLL). In one embodiment, the subject has CLL. In embodiments, the subject has a solid cancer, e.g., a solid cancer described herein.

[1008] In one embodiment, the combination of a CD19 CAR expressing cell described herein and one or more B-cell inhibitor described herein is administered to a subject in combination with a GITR agonist, e.g., a GITR agonist described herein. In one embodiment, the GITR agonist is administered prior to the CAR-expressing cell, e.g., CD19 CAR-expressing cells. For example, in one embodiment, the GITR agonist can be administered prior to apheresis of the cells. In one embodiment, the subject has CLL.

[1009] In one embodiment, a CAR expressing cell described herein is administered to a subject in combination with a GITR agonist, e.g., a GITR agonist described herein. In one embodiment, the GITR agonist is administered prior to the CAR-expressing cell. For example, in one embodiment, the GITR agonist can be administered prior to apheresis of the cells.

[1010] Exemplary GITR agonists include, e.g., GITR fusion proteins and anti-GITR antibodies (e.g., bivalent anti-GITR antibodies) such as, e.g., a GITR fusion protein described in U.S. Pat. No. 6,111,090, European Patent No.: 090505B1, U.S. Pat. No. 8,586,023, PCT Publication Nos.: WO 2010/003118 and 2011/090754, or an anti-GITR antibody described, e.g., in U.S. Pat. No. 7,025,962, European Patent No.: 1947183B1, U.S. Pat. Nos. 7,812,135, 8,388,967, 8,591,886, European Patent No.: EP 1866339, PCT Publication No.: WO 2011/028683, PCT Publication No.: WO 2013/039954, PCT Publication No.: WO2005/007190, PCT Publication No.: WO 2007/133822, PCT Publication No.: WO2005/055808, PCT Publication No.: WO 99/40196, PCT Publication No.: WO 2001/03720, PCT Publication No.: WO99/20758, PCT Publication No.: WO2006/083289, PCT Publication No.: WO 2005/115451, U.S. Pat. No. 7,618,632, and PCT Publication No.: WO 2011/051726.

[1011] In one embodiment, a CAR expressing cell described herein is administered to a subject in combination with a protein tyrosine phosphatase inhibitor, e.g., a protein tyrosine phosphatase inhibitor described herein. In one embodiment, the protein tyrosine phosphatase inhibitor is an SHP-1 inhibitor, e.g., an SHP-1 inhibitor described herein, such as, e.g., sodium stibogluconate. In one embodiment, the protein tyrosine phosphatase inhibitor is an SHP-2 inhibitor, e.g., an SHP-2 inhibitor described herein.

[1012] In one embodiment, a CAR-expressing cell described herein optionally in combination with one or more B-cell inhibitor can be used in combination with a kinase inhibitor. In one embodiment, the kinase inhibitor is a CDK4 inhibitor, e.g., a CDK4 inhibitor described herein, e.g., a CD4/6 inhibitor, such as, e.g., 6-Acetyl-8-cyclopentyl-5-methyl-2-(5-piperazin-1-yl-pyridin-2-ylamino)-8H-pyrido[2,3-d]pyrimidin-7-one, hydrochloride (also referred to as palbociclib or PD0332991). In one embodiment, the kinase inhibitor is a BTK inhibitor, e.g., a BTK inhibitor described herein, such as, e.g., ibrutinib. In one embodiment, the kinase inhibitor is an mTOR inhibitor, e.g., an mTOR inhibitor described herein, such as, e.g., rapamycin, a rapamycin analog, OSI-027. The mTOR inhibitor can be, e.g., an mTORC1 inhibitor and/or an mTORC2 inhibitor, e.g., an mTORC1 inhibitor and/or mTORC2 inhibitor described herein. In one embodiment, the kinase inhibitor is a MNK inhibitor, e.g., a MNK inhibitor described herein, such as, e.g., 4-amino-5-(4-fluoroanilino)-pyrazolo [3,4-d] pyrimidine. The MNK inhibitor can be, e.g., a MNKla, MNK1b, MNK2a and/or MNK2b inhibitor.

[1013] In one embodiment, the kinase inhibitor is a CDK4 inhibitor selected from aloisine A; flavopiridol or HMR-1275, 2-(2-chlorophenyl)-5,7-dihydroxy-8-[(3S,4R)-3-hydroxy-1-methyl-4-piperidinyl]-4-chromenone; crizotinib (PF-02341066; 2-(2-Chlorophenyl)-5,7-dihydroxy-8-[(2R,3S)-2-(hydroxymethyl)-1-methyl-3-pyrrolidinyl]-4H-1-benzopyran-4-one, hydrochloride (P276-00); 1-methyl-5-[[2-[5-(trifluoromethyl)-1H-imidazol-2-yl]-4-pyridinyl]oxy]-N-[4-(trifluoromethyl)phenyl]-1H-benzimidazol-2-amine (RAF265); indisulam (E7070); roscovitine (CYC202); palbociclib (PD0332991); dinaciclib (SCH727965); N-[5-[[(5-tert-butyloxazol-2-yl)methyl]thio]thiazol-2-yl]piperidine-4-carboxamide (BMS 387032); 4-[[9-chloro-7-(2,6-difluorophenyl)-5H-pyrimido[5,4-d][2]benzazepin-2-yl]amino]-benzoic acid (MLN8054); 5-[3-(4,6-difluoro-1H-benzimidazol-2-yl)-1H-indazol-5-yl]-N-ethyl-4-methyl-3-pyridinemethanamine (AG-024322); 4-(2,6-dichlorobenzoylamino)-1H-pyrazole-3-carboxylic acid N-(piperidin-4-yl)amide (AT7519); 4-[2-methyl-1-(1-methylethyl)-1H-imidazol-5-yl]-N-[4-(methylsulfonyl)phenyl]-2-pyrimidinamine (AZD5438); and XL281 (BMS908662).

[1014] In one embodiment, the kinase inhibitor is a CDK4 inhibitor, e.g., palbociclib (PD0332991), and the palbociclib is administered at a dose of about 50 mg, 60 mg, 70 mg, 75 mg, 80 mg, 90 mg, 100 mg, 105 mg, 110 mg, 115 mg, 120 mg, 125 mg, 130 mg, 135 mg (e.g., 75 mg, 100 mg or 125 mg) daily for a period of time, e.g., daily for 14-21 days of a 28 day cycle, or daily for 7-12 days of a 21 day cycle. In one embodiment, 1, 2, 3, 4, 5, 6, 7, 8, 9, 10, 11, 12 or more cycles of palbociclib are administered.

[1015] In embodiments, a CAR-expressing cell described herein is administered to a subject in combination with a cyclin-dependent kinase (CDK) 4 or 6 inhibitor, e.g., a CDK4 inhibitor or a CDK6 inhibitor described herein. In embodiments, a CAR-expressing cell described herein is administered to a subject in combination with a CDK4/6 inhibitor (e.g., an inhibitor that targets both CDK4 and CDK6), e.g., a CDK4/6 inhibitor described herein. In an embodiment, the subject has MCL. MCL is an aggressive cancer that is poorly responsive to currently available therapies, i.e., essentially incurable. In many cases of MCL, cyclin D1 (a regulator of CDK4/6) is expressed (e.g., due to chromosomal translocation involving immunoglobulin and Cyclin D1 genes) in MCL cells. Thus, without being bound by theory, it is thought that MCL cells are highly sensitive to CDK4/6 inhibition with high specificity (i.e., minimal effect on normal immune cells). CDK4/6 inhibitors alone have had some efficacy in treating MCL, but have only achieved partial remission with a high relapse rate. An exemplary CDK4/6 inhibitor is LEE011 (also called ribociclib).

[1016] Without being bound by theory, it is believed that administration of a CAR-expressing cell described herein with a CDK4/6 inhibitor (e.g., LEE011 or other CDK4/6 inhibitor described herein) can achieve higher responsiveness, e.g., with higher remission rates and/or lower relapse rates, e.g., compared to a CDK4/6 inhibitor alone.

[1017] In one embodiment, the kinase inhibitor is a BTK inhibitor selected from ibrutinib (PCI-32765); GDC-0834; RN-486; CGI-560; CGI-1764; HM-71224; CC-292; ONO-4059; CNX-774; and LFM-A13. In an embodiment, the BTK inhibitor does not reduce or inhibit the kinase activity of interleukin-2-inducible kinase (ITK), and is selected from GDC-0834; RN-486; CGI-560; CGI-1764; HM-71224; CC-292; ONO-4059; CNX-774; and LFM-A13.

[1018] In one embodiment, the kinase inhibitor is a BTK inhibitor, e.g., ibrutinib (PCI-32765). In embodiments, a CAR-expressing cell described herein is administered to a subject in combination with a BTK inhibitor (e.g., ibrutinib). In embodiments, a CAR-expressing cell described herein is administered to a subject in combination with ibrutinib (also called PCI-32765). The chemical name of ibrutinib is (1-[(3R)-3-[4-Amino-3-(4-phenoxyphenyl)-1H-pyrazolo[3,4-d]pyrimidin-1-yl]piperidin-1-yl]prop-2-en-1-one).

[1019] In embodiments, the subject has CLL, mantle cell lymphoma (MCL), or small lymphocytic lymphoma (SLL). For example, the subject has a deletion in the short arm of chromosome 17 (del(17p), e.g., in a leukemic cell). In other examples, the subject does not have a del(17p). In embodiments, the subject has relapsed CLL or SLL, e.g., the subject has previously been administered a cancer therapy (e.g., previously been administered one, two, three, or four prior cancer therapies). In embodiments, the subject has refractory CLL or SLL. In other embodiments, the subject has follicular lymphoma, e.g., relapse or refractory follicular lymphoma. In one embodiment, the kinase inhibitor is a BTK inhibitor, e.g., ibrutinib (PCI-32765), and the ibrutinib is administered at a dose of about 250 mg, 300 mg, 350 mg, 400 mg, 420 mg, 440 mg, 460 mg, 480 mg, 500 mg, 520 mg, 540 mg, 560 mg, 580 mg, 600 mg (e.g., 250 mg, 420 mg or 560 mg) daily for a period of time, e.g., daily for 21 day cycle, or daily for 28 day cycle. In one embodiment, 1, 2, 3, 4, 5, 6, 7, 8, 9, 10, 11, 12 or more cycles of ibrutinib are administered. In some embodiments, ibrutinib is administered in combination with rituximab. See, e.g., Burger et al. (2013) Ibrutinib In Combination With Rituximab (iR) Is Well Tolerated and Induces a High Rate Of Durable Remissions In Patients With High-Risk Chronic Lymphocytic Leukemia (CLL): New, Updated Results Of a Phase II Trial In 40 Patients, Abstract 675 presented at₅₅th ASH Annual Meeting and Exposition, New Orleans, La. 7-10 December Without being bound by theory, it is thought that the addition of ibrutinib enhances the T cell proliferative response and may shift T cells from a T-helper-2 (Th2) to T-helper-1 (Thl) phenotype. Th1 and Th2 are phenotypes of helper T cells, with Th1 versus Th2 directing different immune response pathways. A Th1 phenotype is associated with proinflammatory responses, e.g., for killing cells, such as intracellular pathogens/viruses or cancerous cells, or perpetuating autoimmune responses. A Th2 phenotype is associated with eosinophil accumulation and anti-inflammatory responses. In some embodiments of the methods, uses, and compositions herein, the BTK inhibitor is a BTK inhibitor described in International Application WO/2015/079417, which is herein incorporated by reference in its entirety. For instance, in some embodiments, the BTK inhibitor is a compound of formula (I) or a pharmaceutically acceptable salt thereof;

[chemical structure]

wherein,
R1 is hydrogen, C1-C6 alkyl optionally substituted by hydroxy;
R2 is hydrogen or halogen;
R3 is hydrogen or halogen;
R4 is hydrogen;
R5 is hydrogen or halogen;
or R4 and R5 are attached to each other and stand for a bond, —CH2-, —CH2-CH2-, —CH═CH—, —CH═CH—CH2-; —CH2-CH═CH—; or —CH2-CH2-CH2-;
R6 and R7 stand independently from each other for H, C1-C6 alkyl optionally substituted by hydroxyl, C3-C6 cycloalkyl optionally substituted by halogen or hydroxy, or halogen;
R8, R9, R, R′, R10 and R11 independently from each other stand for H, or C1-C6 alkyl optionally substituted by C1-C6 alkoxy; or any two of R8, R9, R, R′, R10 and R11 together with the carbon atom to which they are bound may form a 3-6 membered saturated carbocyclic ring;
R12 is hydrogen or C1-C6 alkyl optionally substituted by halogen or C1-C6 alkoxy;
or R12 and any one of R8, R9, R, R′, R10 or R11 together with the atoms to which they are bound may form a 4, 5, 6 or 7 membered azacyclic ring, which ring may optionally be substituted by halogen, cyano, hydroxyl, C1-C6 alkyl or C1-C6 alkoxy;

[1020] n is 0 or 1; and

[1021] R13 is C2-C6 alkenyl optionally substituted by C1-C6 alkyl, C1-C6 alkoxy or N,N-di-C1-C6 alkyl amino; C2-C6 alkynyl optionally substituted by C1-C6 alkyl or C1-C6 alkoxy; or C2-C6 alkylenyl oxide optionally substituted by C1-C6 alkyl.

[1022] In some embodiments, the BTK inhibitor of Formula I is chosen from: N-(3-(5-((1-Acryloylazetidin-3-yl)oxy)-6-aminopyrimidin-4-yl)-5-fluoro-2-methylphenyl)-4-cyclopropyl-2-fluorobenzamide; (E)-N-(3-(6-Amino-5-((1-(but-2-enoyl)azetidin-3-yl)oxy)pyrimidin-4-yl)-5-fluoro-2-methylphenyl)-4-cyclopropyl-2-fluorobenzamide; N-(3-(6-Amino-5-((1-propioloylazetidin-3-yl)oxy)pyrimidin-4-yl)-5-fluoro-2-methylphenyl)-4-cyclopropyl-2-fluorobenzamide; N-(3-(6-Amino-5-((1-(but-2-ynoyl)azetidin-3-yl)oxy)pyrimidin-4-yl)-5-fluoro-2-methylphenyl)-4-cyclopropyl-2-fluorobenzamide; N-(3-(5-((1-Acryloylpiperidin-4-yl)oxy)-6-aminopyrimidin-4-yl)-5-fluoro-2-methylphenyl)-4-cyclopropyl-2-fluorobenzamide; N-(3-(6-Amino-5-(2-(N-methylacrylamido)ethoxy)pyrimidin-4-yl)-5-fluoro-2-methylphenyl)-4-cyclopropyl-2-fluorobenzamide; (E)-N-(3-(6-Amino-5-(2-(N-methylbut-2-enamido)ethoxy)pyrimidin-4-yl)-5-fluoro-2-methylphenyl)-4-cyclopropyl-2-fluorobenzamide; N-(3-(6-Amino-5-(2-(N-methylpropiolamido)ethoxy)pyrimidin-4-yl)-5-fluoro-2-methylphenyl)-4-cyclopropyl-2-fluorobenzamide; (E)-N-(3-(6-Amino-5-(2-(4-methoxy-N-methylbut-2-enamido)ethoxy)pyrimidin-4-yl)-5-fluoro-2-methylphenyl)-4-cyclopropyl-2-fluorobenzamide; N-(3-(6-Amino-5-(2-(N-methylbut-2-ynamido)ethoxy)pyrimidin-4-yl)-5-fluoro-2-methylphenyl)-4-cyclopropyl-2-fluorobenzamide; N-(2-((4-Amino-6-(3-(4-cyclopropyl-2-fluorobenzamido)-5-fluoro-2-methylphenyl)pyrimidin-5-yl)oxy)ethyl)-N-methyloxirane-2-carboxamide; N-(2-((4-Amino-6-(3-(6-cyclopropyl-8-fluoro-1-oxoisoquinolin-2(1H)-yl)phenyl)pyrimidin-5-yl)oxy)ethyl)-N-methylacrylamide; N-(3-(5-(2-Acrylamidoethoxy)-6-aminopyrimidin-4-yl)-5-fluoro-2-methylphenyl)-4-cyclopropyl-2-fluorobenzamide; N-(3-(6-Amino-5-(2-(N-ethylacrylamido)ethoxy)pyrimidin-4-yl)-5-fluoro-2-methylphenyl)-4-cyclopropyl-2-fluorobenzamide; N-(3-(6-Amino-5-(2-(N-(2-fluoroethyl)acrylamido)ethoxy)pyrimidin-4-yl)-5-fluoro-2-methylphenyl)-4-cyclopropyl-2-fluorobenzamide; N-(3-(5-((1-Acrylamidocyclopropyl)methoxy)-6-aminopyrimidin-4-yl)-5-fluoro-2-methylphenyl)-4-cyclopropyl-2-fluorobenzamide; (S)—N-(3-(5-(2-Acrylamidopropoxy)-6-aminopyrimidin-4-yl)-5-fluoro-2-methylphenyl)-4-cyclopropyl-2-fluorobenzamide; (S)—N-(3-(6-Amino-5-(2-(but-2-ynamido)propoxy)pyrimidin-4-yl)-5-fluoro-2-methylphenyl)-4-cyclopropyl-2-fluorobenzamide; (S)—N-(3-(6-Amino-5-(2-(N-methylacrylamido)propoxy)pyrimidin-4-yl)-5-fluoro-2-methylphenyl)-4-cyclopropyl-2-fluorobenzamide; (S)—N-(3-(6-Amino-5-(2-(N-methylbut-2-ynamido)propoxy)pyrimidin-4-yl)-5-fluoro-2-methylphenyl)-4-cyclopropyl-2-fluorobenzamide; N-(3-(6-Amino-5-(3-(N-methylacrylamido)propoxy)pyrimidin-4-yl)-5-fluoro-2-methylphenyl)-4-cyclopropyl-2-fluorobenzamide; (S)—N-(3-(5-((1-Acryloylpyrrolidin-2-yl)methoxy)-6-aminopyrimidin-4-yl)-5-fluoro-2-methylphenyl)-4-cyclopropyl-2-fluorobenzamide; (S)—N-(3-(6-Amino-5-((1-(but-2-ynoyl)pyrrolidin-2-yl)methoxy)pyrimidin-4-yl)-5-fluoro-2-methylphenyl)-4-cyclopropyl-2-fluorobenzamide; (S)-2-(3-(5-((1-Acryloylpyrrolidin-2-yl)methoxy)-6-aminopyrimidin-4-yl)-5-fluoro-2-(hydroxymethyl)phenyl)-6-cyclopropyl-3,4-dihydroisoquinolin-1(2H)-one; N-(2-((4-Amino-6-(3-(6-cyclopropyl-1-oxo-3,4-dihydroisoquinolin-2(1H)-yl)-5-fluoro-2-(hydroxymethyl)phenyl)pyrimidin-5-yl)oxy)ethyl)-N-methylacrylamide; N-(3-(5-(((2S,4R)-1-Acryloyl-4-methoxypyrrolidin-2-yl)methoxy)-6-aminopyrimidin-4-yl)-5-fluoro-2-methylphenyl)-4-cyclopropyl-2-fluorobenzamide; N-(3-(6-Amino-5-(((2S,4R)-1-(but-2-ynoyl)-4-methoxypyrrolidin-2-yl)methoxy)pyrimidin-4-yl)-5-fluoro-2-methylphenyl)-4-cyclopropyl-2-fluorobenzamide; 2-(3-(5-(((2S,4R)-1-Acryloyl-4-methoxypyrrolidin-2-yl)methoxy)-6-aminopyrimidin-4-yl)-5-fluoro-2-(hydroxymethyl)phenyl)-6-cyclopropyl-3,4-dihydroisoquinolin-1(2H)-one; N-(3-(5-(((2S,4S)-1-Acryloyl-4-methoxypyrrolidin-2-yl)methoxy)-6-aminopyrimidin-4-yl)-5-fluoro-2-methylphenyl)-4-cyclopropyl-2-fluorobenzamide; N-(3-(6-Amino-5-(((2S,4S)-1-(but-2-ynoyl)-4-methoxypyrrolidin-2-yl)methoxy)pyrimidin-4-yl)-5-fluoro-2-methylphenyl)-4-cyclopropyl-2-fluorobenzamide; N-(3-(5-(((2S,4R)-1-Acryloyl-4-fluoropyrrolidin-2-yl)methoxy)-6-aminopyrimidin-4-yl)-5-fluoro-2-methylphenyl)-4-cyclopropyl-2-fluorobenzamide; N-(3-(6-Amino-5-(((2S,4R)-1-(but-2-ynoyl)-4-fluoropyrrolidin-2-yl)methoxy)pyrimidin-4-yl)-5-fluoro-2-methylphenyl)-4-cyclopropyl-2-fluorobenzamide; (S)—N-(3-(5-((1-Acryloylazetidin-2-yl)methoxy)-6-aminopyrimidin-4-yl)-5-fluoro-2-methylphenyl)-4-cyclopropyl-2-fluorobenzamide; (S)—N-(3-(6-Amino-5-((1-propioloylazetidin-2-yl)methoxy)pyrimidin-4-yl)-5-fluoro-2-methylphenyl)-4-cyclopropyl-2-fluorobenzamide; (S)-2-(3-(5-((1-Acryloylazetidin-2-yl)methoxy)-6-aminopyrimidin-4-yl)-5-fluoro-2-(hydroxymethyl)phenyl)-6-cyclopropyl-3,4-dihydroisoquinolin-1(2H)-one; (R)—N-(3-(5-((1-Acryloylazetidin-2-yl)methoxy)-6-aminopyrimidin-4-yl)-5-fluoro-2-methylphenyl)-4-cyclopropyl-2-fluorobenzamide; (R)—N-(3-(5-((1-Acryloylpiperidin-3-yl)methoxy)-6-aminopyrimidin-4-yl)-5-fluoro-2-methylphenyl)-4-cyclopropyl-2-fluorobenzamide; N-(3-(5-(((2R,3S)-1-Acryloyl-3-methoxypyrrolidin-2-yl)methoxy)-6-aminopyrimidin-4-yl)-5-fluoro-2-methylphenyl)-4-cyclopropyl-2-fluorobenzamide; N-(3-(5-(((2S,4R)-1-Acryloyl-4-cyanopyrrolidin-2-yl)methoxy)-6-aminopyrimidin-4-yl)-5-fluoro-2-methylphenyl)-4-cyclopropyl-2-fluorobenzamide; or N-(3-(5-(((2S,4S)-1-Acryloyl-4-cyanopyrrolidin-2-yl)methoxy)-6-aminopyrimidin-4-yl)-5-fluoro-2-methylphenyl)-4-cyclopropyl-2-fluorobenzamide.

[1023] Unless otherwise provided, the chemical terms used above in describing the BTK inhibitor of Formula I are used according to their meanings as set out in International Application WO/2015/079417, which is herein incorporated by reference in its entirety.

[1024] In one embodiment, the kinase inhibitor is an mTOR inhibitor selected from temsirolimus; ridaforolimus (1R,2R,4S)-4-[(2R)-2 [(1R,9S,12S,15R,16E,18R,19R,21R,23S,24E,26E,28Z,30S,32S,35R)-1,18-dihydroxy-19,30-dimethoxy-15,17,21,23, 29,35-hexamethyl-2,3,10,14,20-pentaoxo-11,36-dioxa-4-azatricyclo[30.3.1.04-9] hexatriaconta-16,24,26,28-tetraen-12-yl]propyl]-2-methoxycyclohexyl dimethylphosphinate, also known as AP23573 and MK8669; everolimus (RAD001); rapamycin (AY22989); simapimod; (5-{2,4-bis[(3S)-3-methylmorpholin-4-yl]pyrido[2,3-d]pyrimidin-7-yl}-2-methoxyphenyl)methanol (AZD8055); 2-amino-8-[trans-4-(2-hydroxyethoxy)cyclohexyl]-6-(6-methoxy-3-pyridinyl)-4-methyl-pyrido[2,3-d]pyrimidin-7(8H)-one (PF04691502); and N²-[1,4-dioxo-4-[[4-(4-oxo-8-phenyl-4H-1-benzopyran-2-yl)morpholinium-4-yl]methoxy]butyl]-L-arginylglycyl-L-α-aspartylL-serine-, inner salt (SF1126) (SEQ ID NO: 1316); and XL765.

[1025] In one embodiment, the kinase inhibitor is an mTOR inhibitor, e.g., rapamycin, and the rapamycin is administered at a dose of about 3 mg, 4 mg, 5 mg, 6 mg, 7 mg, 8 mg, 9 mg, 10 mg (e.g., 6 mg) daily for a period of time, e.g., daily for 21 day cycle cycle, or daily for 28 day cycle. In one embodiment, 1, 2, 3, 4, 5, 6, 7, 8, 9, 10, 11, 12 or more cycles of rapamycin are administered. In one embodiment, the kinase inhibitor is an mTOR inhibitor, e.g., everolimus and the everolimus is administered at a dose of about 2 mg, 2.5 mg, 3 mg, 4 mg, 5 mg, 6 mg, 7 mg, 8 mg, 9 mg, 10 mg, 11 mg, 12 mg, 13 mg, 14 mg, 15 mg (e.g., 10 mg) daily for a period of time, e.g., daily for 28 day cycle. In one embodiment, 1, 2, 3, 4, 5, 6, 7, 8, 9, 10, 11, 12 or more cycles of everolimus are administered.

[1026] In one embodiment, the kinase inhibitor is an MNK inhibitor selected from CGP052088; 4-amino-3-(p-fluorophenylamino)-pyrazolo [3,4-d] pyrimidine (CGP57380); cercosporamide; ETC-1780445-2; and 4-amino-5-(4-fluoroanilino)-pyrazolo [3,4-d] pyrimidine.

[1027] In embodiments, a CAR-expressing cell described herein is administered to a subject in combination with a phosphoinositide 3-kinase (PI3K) inhibitor (e.g., a PI3K inhibitor described herein, e.g., idelalisib or duvelisib) and/or rituximab. In embodiments, a CAR-expressing cell described herein is administered to a subject in combination with idelalisib and rituximab. In embodiments, a CAR-expressing cell described herein is administered to a subject in combination with duvelisib and rituximab. Idelalisib (also called GS-1101 or CAL-101; Gilead) is a small molecule that blocks the delta isoform of PI3K. The chemical name for idelalisib is (5-Fluoro-3-phenyl-2-[(1S)-1-(7H-purin-6-ylamino)propyl]-4(3H)-quinazolinone).

[1028] Duvelisib (also called IPI-145; Infinity Pharmaceuticals and Abbvie) is a small molecule that blocks PI3K-δ,γ. The chemical name for duvelisib is (8-Chloro-2-phenyl-3-[(1S)-1-(9H-purin-6-ylamino)ethyl]-1(2H)-isoquinolinone).

[1029] In embodiments, the subject has CLL. In embodiments, the subject has relapsed CLL, e.g., the subject has previously been administered a cancer therapy (e.g., previously been administered an anti-CD20 antibody or previously been administered ibrutinib). For example, the subject has a deletion in the short arm of chromosome 17 (del(17p), e.g., in a leukemic cell). In other examples, the subject does not have a del(17p). In embodiments, the subject comprises a leukemic cell comprising a mutation in the immunoglobulin heavy-chain variable-region (IgVH) gene. In other embodiments, the subject does not comprise a leukemic cell comprising a mutation in the immunoglobulin heavy-chain variable-region (IgVH) gene. In embodiments, the subject has a deletion in the long arm of chromosome 11 (del(11q)). In other embodiments, the subject does not have a del(11q). In embodiments, idelalisib is administered at a dosage of about 100-400 mg (e.g., 100-125, 125-150, 150-175, 175-200, 200-225, 225-250, 250-275, 275-300, 325-350, 350-375, or 375-400 mg), e.g., BID. In embodiments, duvelisib is administered at a dosage of about 15-100 mg (e.g., about 15-25, 25-50, 50-75, or 75-100 mg), e.g., twice a day. In embodiments, rituximab is administered at a dosage of about 350-550 mg/m2 (e.g., 350-375, 375-400, 400-425, 425-450, 450-475, or 475-500 mg/m²), e.g., intravenously.

[1030] In one embodiment, the kinase inhibitor is a dual phosphatidylinositol 3-kinase (PI3K) and mTOR inhibitor selected from 2-Amino-8-[trans-4-(2-hydroxyethoxy)cyclohexyl]-6-(6-methoxy-3-pyridinyl)-4-methyl-pyrido[2,3-d]pyrimidin-7(8H)-one (PF-04691502); N-[4-[[4-(Dimethylamino)-1-piperidinyl]carbonyl]phenyl]-V-[4-(4,6-di-4-morpholinyl-1,3,5-triazin-2-yl)phenyl]urea (PF-05212384, PKI-587); 2-Methyl-2-{4-[3-methyl-2-oxo-8-(quinolin-3-yl)-2,3-dihydro-1H-imidazo[4,5-c]quinolin-1-yl]phenyl}propanenitrile (BEZ-235); apitolisib (GDC-0980, RG7422); 2,4-Difluoro-N-{2-(methyloxy)-5-[4-(4-pyridazinyl)-6-quinolinyl]-3-pyridinyl}benzenesulfonamide (GSK2126458); 8-(6-methoxypyridin-3-yl)-3-methyl-1-(4-(piperazin-1-yl)-3-(trifluoromethyl)phenyl)-1H-imidazo[4,5-c]quinolin-2(3H)-one Maleic acid (NVP-BGT226); 3-[4-(4-Morpholinylpyrido[3′,2′:4,5]furo[3,2-d]pyrimidin-2-yl]phenol (PI-103); 5-(9-isopropyl-8-methyl-2-morpholino-9H-purin-6-yl)pyrimidin-2-amine (VS-5584, SB2343); and N-[2-[(3,5-Dimethoxyphenyl)amino]quinoxalin-3-yl]-4-[(4-methyl-3-methoxyphenyl)carbonyl]aminophenylsulfonamide (XL765).

[1031] In embodiments, a CAR-expressing cell described herein is administered to a subject in combination with an anaplastic lymphoma kinase (ALK) inhibitor. Exemplary ALK kinases include but are not limited to crizotinib (Pfizer), ceritinib (Novartis), alectinib (Chugai), brigatinib (also called AP26113; Ariad), entrectinib (Ignyta), PF-06463922 (Pfizer), TSR-011 (Tesaro) (see, e.g., Clinical Trial Identifier No. NCT02048488), CEP-37440 (Teva), and X-396 (Xcovery). In some embodiments, the subject has a solid cancer, e.g., a solid cancer described herein, e.g., lung cancer.

[1032] The chemical name of crizotinib is 3-[(1R)-1-(2,6-dichloro-3-fluorophenyl)ethoxy]-5-(1-piperidin-4-ylpyrazol-4-yl)pyridin-2-amine. The chemical name of ceritinib is 5-Chloro-N²-[2-isopropoxy-5-methyl-4-(4-piperidinyl)phenyl]-N⁴-[2-(isopropylsulfonyl)phenyl]-2,4-pyrimidinediamine. The chemical name of alectinib is 9-ethyl-6,6-dimethyl-8-(4-morpholinopiperidin-1-yl)-11-oxo-6,11-dihydro-5H-benzo[b]carbazole-3-carbonitrile. The chemical name of brigatinib is 5-Chloro-N²-{4-[4-(dimethylamino)-1-piperidinyl]-2-methoxyphenyl}-N⁴-[2-(dimethylphosphoryl)phenyl]-2,4-pyrimidinediamine. The chemical name of entrectinib is N-(5-(3,5-difluorobenzyl)-1H-indazol-3-yl)-4-(4-methylpiperazin-1-yl)-2-((tetrahydro-2H-pyran-4-yl)amino)benzamide. The chemical name of PF-06463922 is (10R)-7-Amino-12-fluoro-2,10,16-trimethyl-15-oxo-10,15,16,17-tetrahydro-2H-8,4-(metheno)pyrazolo[4,3-h][2,5,11]-benzoxadiazacyclotetradecine-3-carbonitrile. The chemical structure of CEP-37440 is (S)-2-((5-chloro-2-((6-(4-(2-hydroxyethyl)piperazin-1-yl)-1-methoxy-6,7,8,9-tetrahydro-5H-benzo[7]annulen-2-yl)amino)pyrimidin-4-yl)amino)-N-methylbenzamide. The chemical name of X-396 is (R)-6-amino-5-(1-(2,6-dichloro-3-fluorophenyl)ethoxy)-N-(4-(4-methylpiperazine-1-carbonyl)phenyl)pyridazine-3-carboxamide.

[1033] In one embodiment, the kinase inhibitor is an ITK inhibitor selected from ibrutinib; N-(5-(5-(4-Acetylpiperazine-1-carbonyl)-4-methoxy-2-methylphenylthio)thiazol-2-yl)-4-((3,3-dimethylbutan-2-ylamino)methyl)benzamide (BMS-509744); 7-benzyl-1-(3-(piperidin-1-yl)propyl)-2-(4-(pyridin-4-yl)phenyl)-1H-imidazo[4,5-g]quinoxalin-6(5H)-one (CTA056); R)-3-(1-(1-Acryloylpiperidin-3-yl)-4-amino-1H-pyrazolo[3,4-d]pyrimidin-3-yl)-N-(3-methyl-4-(1-methylethyl))benzamide (PF-06465469).

[1034] Drugs that inhibit either the calcium dependent phosphatase calcineurin (cyclosporine and FK506) or inhibit the p70S6 kinase that is important for growth factor induced signaling (rapamycin). (Liu et al., Cell 66:807-815, 1991; Henderson et al., Immun. 73:316-321, 1991; Bierer et al., Curr. Opin. Immun. 5:763-773, 1993) can also be used. In a further aspect, the cell compositions of the present invention may be administered to a patient in conjunction with (e.g., before, simultaneously or following) bone marrow transplantation, T cell ablative therapy using chemotherapy agents such as, fludarabine, external-beam radiation therapy (XRT), cyclophosphamide, and/or antibodies such as OKT3 or CAMPATH. In one aspect, the cell compositions of the present invention are administered following B-cell ablative therapy such as agents that react with CD20, e.g., Rituxan. For example, in one embodiment, subjects may undergo standard treatment with high dose chemotherapy followed by peripheral blood stem cell transplantation. In certain embodiments, following the transplant, subjects receive an infusion of the expanded immune cells of the present invention. In an additional embodiment, expanded cells are administered before or following surgery.

[1035] In embodiments, a CAR-expressing cell described herein is administered to a subject in combination with an indoleamine 2,3-dioxygenase (IDO) inhibitor. IDO is an enzyme that catalyzes the degradation of the amino acid, L-tryptophan, to kynurenine. Many cancers overexpress IDO, e.g., prostatic, colorectal, pancreatic, cervical, gastric, ovarian, head, and lung cancer. pDCs, macrophages, and dendritic cells (DCs) can express IDO. Without being bound by theory, it is thought that a decrease in L-tryptophan (e.g., catalyzed by IDO) results in an immunosuppressive milieu by inducing T-cell anergy and apoptosis. Thus, without being bound by theory, it is thought that an IDO inhibitor can enhance the efficacy of a CAR-expressing cell described herein, e.g., by decreasing the suppression or death of a CAR-expressing immune cell. In embodiments, the subject has a solid tumor, e.g., a solid tumor described herein, e.g., prostatic, colorectal, pancreatic, cervical, gastric, ovarian, head, or lung cancer. Exemplary inhibitors of IDO include but are not limited to 1-methyl-tryptophan, indoximod (NewLink Genetics) (see, e.g., Clinical Trial Identifier Nos. NCT01191216; NCT01792050), and INCB024360 (Incyte Corp.) (see, e.g., Clinical Trial Identifier Nos. NCT01604889; NCT01685255)

[1036] In embodiments, a CAR-expressing cell described herein is administered to a subject in combination with a modulator of myeloid-derived suppressor cells (MDSCs). MDSCs accumulate in the periphery and at the tumor site of many solid tumors. These cells suppress T cell responses, thereby hindering the efficacy of CAR-expressing cell therapy. Without being bound by theory, it is thought that administration of a MDSC modulator enhances the efficacy of a CAR-expressing cell described herein. In an embodiment, the subject has a solid tumor, e.g., a solid tumor described herein, e.g., glioblastoma. Exemplary modulators of MDSCs include but are not limited to MCS110 and BLZ945. MCS110 is a monoclonal antibody (mAb) against macrophage colony-stimulating factor (M-CSF). See, e.g., Clinical Trial Identifier No. NCT00757757. BLZ945 is a small molecule inhibitor of colony stimulating factor 1 receptor (CSF1R). See, e.g., Pyonteck et al. Nat. Med. 19(2013):1264-72.

[1037] In embodiments, a CAR-expressing cell described herein is administered to a subject in combination with a CD19 CART cell (e.g., CTL019, e.g., as described in WO2012/079000, incorporated herein by reference). In embodiments, the subject has acute myeloid leukemia (AML), e.g., a CD19 positive AML or a CD19 negative AML. In embodiments, the subject has a CD19+ lymphoma, e.g., a CD19+ Non-Hodgkin's Lymphoma (NHL), a CD19+ FL, or a CD19+ DLBCL. In embodiments, the subject has a relapsed or refractory CD19+ lymphoma. In embodiments, a lymphodepleting chemotherapy is administered to the subject prior to, concurrently with, or after administration (e.g., infusion) of CD19 CART cells. In an example, the lymphodepleting chemotherapy is administered to the subject prior to administration of CD19 CART cells. For example, the lymphodepleting chemotherapy ends 1-4 days (e.g., 1, 2, 3, or 4 days) prior to CD19 CART cell infusion. In embodiments, multiple doses of CD19 CART cells are administered, e.g., as described herein. For example, a single dose comprises about 5×10⁸ CD19 CART cells. In embodiments, a lymphodepleting chemotherapy is administered to the subject prior to, concurrently with, or after administration (e.g., infusion) of a CAR-expressing cell described herein, e.g., a non-CD19 CAR-expressing cell. In embodiments, a CD19 CART is administered to the subject prior to, concurrently with, or after administration (e.g., infusion) of a non-CD19 CAR-expressing cell, e.g., a non-CD19 CAR-expressing cell described herein.

[1038] In some embodiments, a CAR-expressing cell described herein is administered to a subject in combination with a CD19 CAR-expressing cell, e.g., CTL019, e.g., as described in WO2012/079000, incorporated herein by reference, for treatment of a disease associated with the expression of CLL-1, e.g., a cancer described herein. Without being bound by theory, it is believed that administering a CD19 CAR-expressing cell in combination with a CAR-expressing cell improves the efficacy of a CAR-expressing cell described herein by targeting early lineage cancer cells, e.g., cancer stem cells, modulating the immune response, depleting regulatory B cells, and/or improving the tumor microenvironment. For example, a CD19 CAR-expressing cell targets cancer cells that express early lineage markers, e.g., cancer stem cells and CD19-expressing cells, while the CAR-expressing cell described herein targets cancer cells that express later lineage markers, e.g., CLL-1. This preconditioning approach can improve the efficacy of the CAR-expressing cell described herein. In such embodiments, the CD19 CAR-expressing cell is administered prior to, concurrently with, or after administration (e.g., infusion) of a CAR-expressing cell described herein.

[1039] In embodiments, a CAR-expressing cell described herein also expresses a CAR targeting CD19, e.g., a CD19 CAR. In an embodiment, the cell expressing a CAR described herein and a CD19 CAR is administered to a subject for treatment of a cancer described herein, e.g., AML. In an embodiment, the configurations of one or both of the CAR molecules comprise a primary intracellular signaling domain and a costimulatory signaling domain. In another embodiment, the configurations of one or both of the CAR molecules comprise a primary intracellular signaling domain and two or more, e.g., 2, 3, 4, or 5 or more, costimulatory signaling domains. In such embodiments, the CAR molecule described herein and the CD19 CAR may have the same or a different primary intracellular signaling domain, the same or different costimulatory signaling domains, or the same number or a different number of costimulatory signaling domains. Alternatively, the CAR described herein and the CD19 CAR are configured as a split CAR, in which one of the CAR molecules comprises an antigen binding domain and a costimulatory domain (e.g., 4-1BB), while the other CAR molecule comprises an antigen binding domain and a primary intracellular signaling domain (e.g., CD3 zeta).

[1040] In some embodiments, a CAR-expressing cell described herein is administered to a subject in combination with a interleukin-15 (IL-15) polypeptide, a interleukin-15 receptor alpha (IL-15Ra) polypeptide, or a combination of both a IL-15 polypeptide and a IL-15Ra polypeptide e.g., hetIL-15 (Admune Therapeutics, LLC). hetIL-15 is a heterodimeric non-covalent complex of IL-15 and IL-15Ra. hetIL-15 is described in, e.g., U.S. Pat. No. 8,124,084, U.S. 2012/0177598, U.S. 2009/0082299, U.S. 2012/0141413, and U.S. 2011/0081311, incorporated herein by reference. In embodiments, het-IL-15 is administered subcutaneously. In embodiments, the subject has a cancer, e.g., solid cancer, e.g., melanoma or colon cancer. In embodiments, the subject has a metastatic cancer.

[1041] In embodiments, a subject having a disease described herein, e.g., a hematological disorder, e.g., AML or MDS, is administered a CAR-expressing cell described herein in combination with an agent, e.g., cytotoxic or chemotherapy agent, a biologic therapy (e.g., antibody, e.g., monoclonal antibody, or cellular therapy), or an inhibitor (e.g., kinase inhibitor). In embodiments, the subject is administered a CAR-expressing cell described herein in combination with a cytotoxic agent, e.g., CPX-351 (Celator Pharmaceuticals), cytarabine, daunorubicin, vosaroxin (Sunesis Pharmaceuticals), sapacitabine (Cyclacel Pharmaceuticals), idarubicin, or mitoxantrone. CPX-351 is a liposomal formulation comprising cytarabine and daunorubicin at a 5:1 molar ratio. In embodiments, the subject is administered a CAR-expressing cell described herein in combination with a hypomethylating agent, e.g., a DNA methyltransferase inhibitor, e.g., azacitidine or decitabine. In embodiments, the subject is administered a CAR-expressing cell described herein in combination with a biologic therapy, e.g., an antibody or cellular therapy, e.g., 225Ac-lintuzumab (Actimab-A; Actinium Pharmaceuticals), IPH2102 (Innate Pharma/Bristol Myers Squibb), SGN-CD33A (Seattle Genetics), or gemtuzumab ozogamicin (Mylotarg; Pfizer). SGN-CD33A is an antibody-drug conjugate (ADC) comprising a pyrrolobenzodiazepine dimer that is attached to an anti-CD33 antibody. Actimab-A is an anti-CD33 antibody (lintuzumab) labeled with actinium. IPH2102 is a monoclonal antibody that targets killer immunoglobulin-like receptors (KIRs). In embodiments, the subject is administered a CAR-expressing cell described herein in combination a FLT3 inhibitor, e.g., sorafenib (Bayer), midostaurin (Novartis), quizartinib (Daiichi Sankyo), crenolanib (Arog Pharmaceuticals), PLX3397 (Daiichi Sankyo), AKN-028 (Akinion Pharmaceuticals), or ASP2215 (Astellas). In embodiments, the subject is administered a CAR-expressing cell described herein in combination with an isocitrate dehydrogenase (IDH) inhibitor, e.g., AG-221 (Celgene/Agios) or AG-120 (Agios/Celgene). In embodiments, the subject is administered a CAR-expressing cell described herein in combination with a cell cycle regulator, e.g., inhibitor of polo-like kinase 1 (Plkl), e.g., volasertib (Boehringer Ingelheim); or an inhibitor of cyclin-dependent kinase 9 (Cdk9), e.g., alvocidib (Tolero Pharmaceuticals/Sanofi Aventis). In embodiments, the subject is administered a CAR-expressing cell described herein in combination with a B cell receptor signaling network inhibitor, e.g., an inihibitor of B-cell lymphoma 2 (Bcl-2), e.g., venetoclax (Abbvie/Roche); or an inhibitor of Bruton's tyrosine kinase (Btk), e.g., ibrutinib (Pharmacyclics/Johnson & Johnson Janssen Pharmaceutical). In embodiments, the subject is administered a CAR-expressing cell described herein in combination with an inhibitor of M1 aminopeptidase, e.g., tosedostat (CTI BioPharma/Vernalis); an inhibitor of histone deacetylase (HDAC), e.g., pracinostat (MEI Pharma); a multi-kinase inhibitor, e.g., rigosertib (Onconova Therapeutics/Baxter/SymBio); or a peptidic CXCR4 inverse agonist, e.g., BL-8040 (BioLineRx).

[1042] In another embodiment, the subjects receive an infusion of the CAR expressing cell, e.g., CD19 CAR-expressing cell, compositions of the present invention prior to transplantation, e.g., allogeneic stem cell transplant, of cells. In a preferred embodiment, CAR expressing cells transiently express the CAR, e.g., by electroporation of an mRNA CAR, whereby the expression of the antigen targeted by the CAR, e.g., CD19 is terminated prior to infusion of donor stem cells to avoid engraftment failure. In one embodiment, the subject can be administered an agent which reduces or ameliorates a side effect associated with the administration of a CAR-expressing cell. Side effects associated with the administration of a CAR-expressing cell include, but are not limited to CRS, and hemophagocytic lymphohistiocytosis (HLH), also termed Macrophage Activation Syndrome (MAS). Symptoms of CRS include high fevers, nausea, transient hypotension, hypoxia, and the like. Accordingly, the methods described herein can comprise administering a CAR-expressing cell described herein to a subject and further administering an agent to manage elevated levels of a soluble factor resulting from treatment with a CAR-expressing cell. In one embodiment, the soluble factor elevated in the subject is one or more of IFN-γ, TNFα, IL-2 and IL-6. Therefore, an agent administered to treat this side effect can be an agent that neutralizes one or more of these soluble factors. Examples of such agents include, but are not limited to a steroid (e.g., corticosteroid), an inhibitor of TNFα, and an inhibitor of IL-6. An example of a TNFa inhibitor is an anti-TNFa antibody molecule such as, infliximab, adalimumab, certolizumab pegol, and golimumab. Another example of a TNFa inhibitor is a fusion protein such as entanercept. Small molecule inhibitor of TNFa include, but are not limited to, xanthine derivatives (e.g. pentoxifylline) and bupropion. An example of an IL-6 inhibitor is an anti-IL-6 antibody molecule such as tocilizumab (toc), sarilumab, elsilimomab, CNTO 328, ALD518/BMS-945429, CNTO 136, CPSI-2364, CDP6038, VX30, ARGX-109, FE301, and FM101. In one embodiment, the anti-IL-6 antibody molecule is tocilizumab. An example of an IL-1R based inhibitor is anakinra.

[1043] In embodiments, lymphodepletion is performed on a subject, e.g., prior to administering one or more cells that express a CAR described herein. In embodiments, the lymphodepletion comprises administering one or more of melphalan, cytoxan, cyclophosphamide, and fludarabine. In embodiments, the lymphodepletion comprises administering bendamustine (e.g., at about 90 mg/m², e.g., daily×2), cyclophosphamide and fludarabine (e.g., at about 200 mg/m2 cyclophosphamide and about 20 mg/m2 fludarabine, e.g., daily×3), XRT and cyclophosphamide (e.g., at about 400 cGy XRT and about 1 g/m²cyclophosphamide), cyclophosphamide (e.g., about 1 g/m² or 1.2 g/m² cyclophosphamide, e.g., over 4 days), carboplatin and gemcitabine, or modified EPOCH.

[1044] In embodiments, a lymphodepleting chemotherapy is administered to the subject prior to, concurrently with, or after administration (e.g., infusion) of CAR cells, e.g., cells described herein. In an example, the lymphodepleting chemotherapy is administered to the subject prior to administration of CAR cells. For example, the lymphodepleting chemotherapy ends 1-4 days (e.g., 1, 2, 3, or 4 days) prior to CAR cell infusion. In embodiments, multiple doses of CAR cells are administered, e.g., as described herein. For example, a single dose comprises about 5×10⁸ CAR cells. In embodiments, a lymphodepleting chemotherapy is administered to the subject prior to, concurrently with, or after administration (e.g., infusion) of a CAR-expressing cell described herein.

[1045] In some embodiments, CAR-expressing cells described herein are administered to a subject in combination with a CD19 CAR-expressing cell, e.g., CTL019, e.g., as described in WO2012/079000, incorporated herein by reference, for treatment of a disease associated with the expression of cancer antigen, e.g., a cancer described herein. Without being bound by theory, it is believed that administering a CD19 CAR-expressing cell in combination with another CAR-expressing cell improves the efficacy of a CAR-expressing cell described herein by targeting early lineage cancer cells, e.g., cancer stem cells, modulating the immune response, depleting regulatory B cells, and/or improving the tumor microenvironment. For example, a CD19 CAR-expressing cell targets cancer cells that express early lineage markers, e.g., cancer stem cells and CD19-expressing cells, while some other CAR-expressing cells described herein target cancer cells that express later lineage markers. This preconditioning approach can improve the efficacy of the CAR-expressing cell described herein. In such embodiments, the CD19 CAR-expressing cell is administered prior to, concurrently with, or after administration (e.g., infusion) of the second CAR-expressing cell.

[1046] In embodiments, a CAR-expressing cell which expresses a CAR targeting a cancer antigen other than CD19 also expresses a CAR targeting CD19, e.g., a CD19 CAR. In an embodiment, the cell expressing a non-CD19 CAR and a CD19 CAR is administered to a subject for treatment of a cancer described herein, e.g., AML. In an embodiment, the configurations of one or both of the CAR molecules comprise a primary intracellular signaling domain and a costimulatory signaling domain. In another embodiment, the configurations of one or both of the CAR molecules comprise a primary intracellular signaling domain and two or more, e.g., 2, 3, 4, or 5 or more, costimulatory signaling domains. In such embodiments, the non-CD19 CAR molecule and the CD19 CAR may have the same or a different primary intracellular signaling domain, the same or different costimulatory signaling domains, or the same number or a different number of costimulatory signaling domains. Alternatively, the non-CD19 CAR and the CD19 CAR are configured as a split CAR, in which one of the CAR molecules comprises an antigen binding domain and a costimulatory domain (e.g., 4-1BB), while the other CAR molecule comprises an antigen binding domain and a primary intracellular signaling domain (e.g., CD3 zeta).

### Inhibitory Molecule Inhibitors/Checkpoint Inhibitors

[1047] In one embodiment, the subject can be administered an agent which enhances the activity of a CAR-expressing cell. For example, in one embodiment, the agent can be an agent which inhibits an inhibitory molecule, e.g., the agent is a checkpoint inhibitor. Inhibitory or checkpoint molecules, e.g., Programmed Death 1 (PD1), can, in some embodiments, decrease the ability of a CAR-expressing cell to mount an immune effector response. Examples of inhibitory molecules include PD1, PD-L1, PD-L2, CTLA4, TIM3, CEACAM (e.g., CEACAM-1, CEACAM-3 and/or CEACAM-5), LAG3, VISTA, BTLA, TIGIT, LAIR1, CD160, 2B4, CD160, 2B4, CD80, CD86, B7-H3 (CD276), B7-H4 (VTCN1), HVEM (TNFRSF14 or CD270), KIR, A2aR, MHC class I, MHC class II, GAL9, adenosine, and TGF (e.g., TGF beta). In embodiments, the CAR-expressing cell described herein comprises a switch costimulatory receptor, e.g., as described in WO 2013/019615, which is incorporated herein by reference in its entirety.

[1048] The methods described herein can include administration of a CAR-expressing cell in combination with a checkpoint inhibitor. In one embodiment, the subject is a complete responder. In another embodiment, the subject is a partial responder or non-responder, and, e.g., in some embodiments, the checkpoint inhibitor is administered prior to the CAR-expressing cell, e.g., two weeks, 12 days, 10 days, 8 days, one week, 6 days, 5 days, 4 days, 3 days, 2 days or 1 day before administration of the CAR-expressing cell. In some embodiments, the checkpoint inhibitor is administered concurrently with the CAR-expressing cell.

[1049] Inhibition of an inhibitory molecule, e.g., by inhibition at the DNA, RNA or protein level, can optimize a CAR-expressing cell performance. In embodiments, an inhibitory nucleic acid, e.g., an inhibitory nucleic acid, e.g., a dsRNA, e.g., an siRNA or shRNA, or a clustered regularly interspaced short palindromic repeats (CRISPR), a transcription-activator like effector nuclease (TALEN), or a zinc finger endonuclease (ZFN), can be used to inhibit expression of an inhibitory molecule in the CAR-expressing cell. In an embodiment the inhibitor is an shRNA. In an embodiment, the inhibitory molecule is inhibited within a CAR-expressing cell. In these embodiments, a dsRNA molecule that inhibits expression of the inhibitory molecule is linked to the nucleic acid that encodes a component, e.g., all of the components, of the CAR.

[1050] In an embodiment, a nucleic acid molecule that encodes a dsRNA molecule that inhibits expression of the molecule that modulates or regulates, e.g., inhibits, T-cell function is operably linked to a promoter, e.g., a H1- or a U6-derived promoter such that the dsRNA molecule that inhibits expression of the molecule that modulates or regulates, e.g., inhibits, T-cell function is expressed, e.g., is expressed within a CAR-expressing cell. See e.g., Tiscornia G., “Development of Lentiviral Vectors Expressing siRNA,” Chapter 3, in Gene Transfer: Delivery and Expression of DNA and RNA (eds. Friedmann and Rossi). Cold Spring Harbor Laboratory Press, Cold Spring Harbor, N.Y., USA, 2007; Brummelkamp T R, et al. (2002) Science 296: 550-553; Miyagishi M, et al. (2002) Nat. Biotechnol. 19: 497-500. In an embodiment the nucleic acid molecule that encodes a dsRNA molecule that inhibits expression of the molecule that modulates or regulates, e.g., inhibits, T-cell function is present on the same vector, e.g., a lentiviral vector, that comprises a nucleic acid molecule that encodes a component, e.g., all of the components, of the CAR. In such an embodiment, the nucleic acid molecule that encodes a dsRNA molecule that inhibits expression of the molecule that modulates or regulates, e.g., inhibits, T-cell function is located on the vector, e.g., the lentiviral vector, 5′- or 3′- to the nucleic acid that encodes a component, e.g., all of the components, of the CAR. The nucleic acid molecule that encodes a dsRNA molecule that inhibits expression of the molecule that modulates or regulates, e.g., inhibits, T-cell function can be transcribed in the same or different direction as the nucleic acid that encodes a component, e.g., all of the components, of the CAR. In an embodiment the nucleic acid molecule that encodes a dsRNA molecule that inhibits expression of the molecule that modulates or regulates, e.g., inhibits, T-cell function is present on a vector other than the vector that comprises a nucleic acid molecule that encodes a component, e.g., all of the components, of the CAR. In an embodiment, the nucleic acid molecule that encodes a dsRNA molecule that inhibits expression of the molecule that modulates or regulates, e.g., inhibits, T-cell function it transiently expressed within a CAR-expressing cell. In an embodiment, the nucleic acid molecule that encodes a dsRNA molecule that inhibits expression of the molecule that modulates or regulates, e.g., inhibits, T-cell function is stably integrated into the genome of a CAR-expressing cell. In an embodiment, the molecule that modulates or regulates, e.g., inhibits, T-cell function is PD-1.

[1051] In one embodiment, the inhibitor of an inhibitory signal can be, e.g., an antibody or antibody fragment that binds to an inhibitory molecule. For example, the agent can be an antibody or antibody fragment that binds to PD1, PD-L1, PD-L2 or CTLA4 (e.g., ipilimumab (also referred to as MDX-010 and MDX-101, and marketed as Yervoy®; Bristol-Myers Squibb; Tremelimumab (IgG2 monoclonal antibody available from Pfizer, formerly known as ticilimumab, CP-675,206)). In an embodiment, the agent is an antibody or antibody fragment that binds to TIM3. In an embodiment, the agent is an antibody or antibody fragment that binds to LAG3. In an embodiment, the agent is an antibody or antibody fragment that binds to CEACAM (e.g., CEACAM-1, CEACAM-3 and/or CEACAM-5). In embodiments, the agent that enhances the activity of a CAR-expressing cell, e.g., inhibitor of an inhibitory molecule, is administered in combination with an allogeneic CAR, e.g., an allogeneic CAR described herein (e.g., described in the Allogeneic CAR section herein).

[1052] PD1 is an inhibitory member of the CD28 family of receptors that also includes CD28, CTLA-4, ICOS, and BTLA. PD1 is expressed on activated B cells, T cells and myeloid cells (Agata et al. 1996 Int. Immunol 8:765-75). Two ligands for PD1, PD-L1 and PD-L2 have been shown to downregulate T cell activation upon binding to PD1 (Freeman et a. 2000 J Exp Med 192:1027-34; Latchman et al. 2001 Nat Immunol 2:261-8; Carter et al. 2002 Eur J Immunol 32:634-43). PD-L1 is abundant in human cancers (Dong et al. 2003 J Mol Med 81:281-7; Blank et al. 2005 Cancer Immunol. Immunother 54:307-314; Konishi et al. 2004 Clin Cancer Res 10:5094). Immune suppression can be reversed by inhibiting the local interaction of PD1 with PD-L1.

[1053] Antibodies, antibody fragments, and other inhibitors of PD1, PD-L1 and PD-L2 are available in the art and may be used combination with a CD19 CAR described herein. For example, nivolumab (also referred to as BMS-936558 or MDX1106; Bristol-Myers Squibb) is a fully human IgG4 monoclonal antibody which specifically blocks PD1. Nivolumab (clone 5C4) and other human monoclonal antibodies that specifically bind to PD1 are disclosed in U.S. Pat. No. 8,008,449 and WO2006/121168. Pidilizumab (CT-011; Cure Tech) is a humanized IgG1k monoclonal antibody that binds to PD1. Pidilizumab and other humanized anti-PD1 monoclonal antibodies are disclosed in WO2009/101611. Pembrolizumab (formerly known as lambrolizumab, and also referred to as Keytruda, MK03475; Merck) is a humanized IgG4 monoclonal antibody that binds to PD1. Pembrolizumab and other humanized anti-PD1 antibodies are disclosed in U.S. Pat. No. 8,354,509 and WO2009/114335. MEDI4736 (Medimmune) is a human monoclonal antibody that binds to PDL1, and inhibits interaction of the ligand with PD1. MDPL3280A (Genentech/Roche) is a human Fc optimized IgG1 monoclonal antibody that binds to PD-L1. MDPL3280A and other human monoclonal antibodies to PD-L1 are disclosed in U.S. Pat. No. 7,943,743 and U.S Publication No.: 20120039906. Other anti-PD-L1 binding agents include YW243.55.S70 (heavy and light chain variable regions are shown in SEQ ID NOs 20 and 21 in WO2010/077634) and MDX-1 105 (also referred to as BMS-936559, and, e.g., anti-PD-L1 binding agents disclosed in WO2007/005874). AMP-224 (B7-DCIg; Amplimmune; e.g., disclosed in WO2010/027827 and WO2011/066342), is a PD-L2 Fc fusion soluble receptor that blocks the interaction between PD1 and B7-H1. Other anti-PD1 antibodies include AMP 514 (Amplimmune), among others, e.g., anti-PD1 antibodies disclosed in U.S. Pat. No. 8,609,089, US 2010028330, and/or US 20120114649.

[1054] In some embodiments, a PD1 inhibitor described herein (e.g., a PD1 antibody, e.g., a PD1 antibody described herein) is used combination with a CD19 CAR described herein to treat a disease associated with expression of CD19. In some embodiments, a PD-L1 inhibitor described herein (e.g., a PD-L1 antibody, e.g., a PD-L1 antibody described herein) is used combination with a CD19 CAR described herein to treat a disease associated with expression of CD19. In some embodiments, the CD19 CAR therapy is administered prior to, simultaneously with or after the PD-1 inhibitor. In one embodiment, the CD19 CAR therapy is administered prior to the PD-1 inhibitor. For example, one or more doses of the PD-1 inhibitor can be administered post-CD19 CAR therapy (e.g., starting 5 days to 4 months, e.g., 10 day to 3 months, e.g., 14 days to 2 months post-CD19 CAR therapy). In some embodiments, the combination of the CD19 CAR therapy and PD-1 inhibitor therapy is repeated.

[1055] The disease may be, e.g., a lymphoma such as DLBCL including primary DLBCL or secondary DLBCL. In some embodiments, the subject has, or is identified as having, at least 5%, 6%, 7%, 8%, 9%, 10%, 20%, 30%, 40%, 50%, 60%, 70%, 80%, or 90% of cancer cells, e.g., DLBCL cells, which are CD3+/PD1+. In some embodiments, the subject has, or is identified as having, substantially non-overlapping populations of CD19+ cells and PD-L1+ cells in a cancer, e.g., the cancer microenvironment. For instance, in some embodiments, less than 20%, 10%, 9%, 8%, 7%, 6%, 5%, 4%, 3%, 2%, or 1% of cells in the cancer, e.g., cancer microenvironment, are double positive for CD19 and PD-L1.

[1056] In embodiments of the CD19 CAR therapy-PD1 inhibitor therapy, the CD19 CAR therapy comprises one or more treatments with cells that express a murine CAR molecule described herein, e.g., a murine CD19 CAR molecule of Tables 3, 4 and 5 on pages 359-363 of International Application WO 2016/164731, filed Apr. 8, 2016, which is incorporated by reference in its entirety.

[1057] In another embodiment of the CD19 CAR therapy-PD1 inhibitor therapy, the CD19 CAR therapy comprises one or more treatments with cells that express a humanized CD19 CAR, e.g., a humanized CD19 CAR according to Tables 2, 4 and 5 on page 339-363 of International Application WO 2016/164731, filed Apr. 8, 2016, which is incorporated by reference in its entirety.

[1058] In some embodiments, the subject is treated with a combination of a CD19 CAR, a PD1 inhibitor, and a PD-L1 inhibitor. In some embodiments, the subject is treated with a combination of a CD19 CAR, a PD1 inhibitor, and a CD3 inhibitor. In some embodiments, the subject is treated with a combination of a CD19 CAR, a PD1 inhibitor, a PD-L1 inhibitor, and a CD3 inhibitor. Optionally, the subject has, or is identified as having, at least 5%, 6%, 7%, 8%, 9%, 10%, 20%, 30%, 40%, 50%, 60%, 70%, 80%, or 90% of cancer cells, e.g., DLBCL cells, which are CD3⁺/PD1+.

[1059] In some embodiments, the methods herein include a step of assaying cells in a biological sample, e.g., a sample comprising DLBCL cells, for CD3 and/or PD-1 (e.g., CD3 and/or PD-1 expression). In some embodiments, the methods include a step of assaying cells in a biological sample, e.g., a sample comprising DLBCL cells, for CD19 and/or PD-L1 (e.g., CD19 and/or PD-L1 expression). In some embodiments, the methods include, e.g., providing a sample comprising cancer cells and performing a detection step, e.g., by immunohistochemistry, for one or more of CD3, PD-1, CD19, or PD-L1. The methods may comprise a further step of recommending or administering a treatment, e.g., a treatment comprising a CD19 CAR.

[1060] In one embodiment, the anti-PD-1 antibody or fragment thereof is an anti-PD-1 antibody molecule as described in US 2015/0210769, entitled “Antibody Molecules to PD-1 and Uses Thereof,” incorporated by reference in its entirety. In one embodiment, the anti-PD-1 antibody molecule includes at least one, two, three, four, five or six CDRs (or collectively all of the CDRs) from a heavy and light chain variable region from an antibody chosen from any of BAP049-hum01, BAP049-hum02, BAP049-hum03, BAP049-hum04, BAP049-hum05, BAP049-hum06, BAP049-hum07, BAP049-hum08, BAP049-hum09, BAP049-hum10, BAP049-hum11, BAP049-hum12, BAP049-hum13, BAP049-hum14, BAP049-hum15, BAP049-hum16, BAP049-Clone-A, BAP049-Clone-B, BAP049-Clone-C, BAP049-Clone-D, or BAP49-Clone-E; or as described in Table 1 of US 2015/0210769, or encoded by the nucleotide sequence in Table 1, or a sequence substantially identical (e.g., at least 80%, 85%, 90%, 92%, 95%, 97%, 98%, 99% or higher identical) to any of the aforesaid sequences; or closely related CDRs, e.g., CDRs which are identical or which have at least one amino acid alteration, but not more than two, three or four alterations (e.g., substitutions, deletions, or insertions, e.g., conservative substitutions).

[1061] In yet another embodiment, the anti-PD-1 antibody molecule comprises at least one, two, three or four variable regions from an antibody described herein, e.g., an antibody chosen from any of BAP049-hum01, BAP049-hum02, BAP049-hum03, BAP49-hum04, BAP49-hum05, BAP049-hum06, BAP049-hum07, BAP049-hum08, BAP049-hum09, BAP049-hum10, BAP049-hum11, BAP049-hum12, BAP049-hum13, BAP049-hum14, BAP049-hum15, BAP049-hum16, BAP049-Clone-A, BAP049-Clone-B, BAP049-Clone-C, BAP049-Clone-D, or BAP49-Clone-E; or as described in Table 1 of US 2015/0210769, or encoded by the nucleotide sequence in Table 1; or a sequence substantially identical (e.g., at least 80%, 85%, 90%, 92%, 95%, 97%, 98%, 99% or higher identical) to any of the aforesaid sequences.

[1062] In one embodiment of the CD19 CAR therapy-PD1 inhibitor therapy, the PD-1 inhibitor, e.g., pembrolizumab, is administered post-CD19 CAR therapy (e.g., starting 5 days to 4 months, e.g., 10 day to 3 months, e.g., 14 days to 2 months post-CTL019 or post-CTL119 therapy, or post-a combination of CTL019 and CTL119 therapies). In embodiments, administration of the therapy is to a subject with B-ALL, e.g., relapsed or refractory B-ALL.

[1063] In yet another embodiment of the CD19 CAR therapy-PD1 inhibitor therapy, the hematologic cancer is B-ALL, e.g., relapsed or refractory B-ALL.

[1064] In one embodiment, the subject has a hematologic malignancy, e.g., B-ALL, and may not respond to the CAR T therapy or may relapse, e.g., due to poor CAR T cell persistence.

[1065] In one embodiment of the CD19 CAR therapy-PD1 inhibitor therapy, the subject shows an improved therapeutic outcome, e.g., the subject achieves one or more of partial remission, complete remission, or prolonged CAR T cell persistence, in response to the CD19 CAR therapy-PD1 inhibitor therapy, e.g., one or more cycles of the CD19 CAR therapy-PD1 inhibitor therapy.

[1066] In one embodiment of the CD19 CAR therapy-PD1 inhibitor therapy, prior to administration of the PD-1 inhibitor, the subject has relapsed or refractory B-ALL to a prior treatment with a CD19 CAR therapy, e.g., a prior treatment with one or both of CTL019 and CTL119. In some embodiments, the subject shows decreased or poor CAR T cell persistence. In some embodiments, the subject shows CD19+ relapse.

[1067] In some embodiments, the subject, e.g., a subject showing CD19+ relapse after a CD19CAR therapy, is administered a further CD19 CAR therapy, in combination with the PD-1 inhibitor, e.g., pembrolizumab. In embodiments, the further administration of the combination therapy results in an improved therapeutic outcome, e.g., the subject achieves one or more of partial remission, complete remission, or a prolonged CAR T cell persistence.

[1068] TIM3 (T cell immunoglobulin-3) also negatively regulates T cell function, particularly in IFN-g-secreting CD4+ T helper 1 and CD8+ T cytotoxic 1 cells, and plays a critical role in T cell exhaustion. Inhibition of the interaction between TIM3 and its ligands, e.g., galectin-9 (Gal9), phosphatidylserine (PS), and HMGB1, can increase immune response. Antibodies, antibody fragments, and other inhibitors of TIM3 and its ligands are available in the art and may be used combination with a CD19 CAR described herein. For example, antibodies, antibody fragments, small molecules, or peptide inhibitors that target TIM3 binds to the IgV domain of TIM3 to inhibit interaction with its ligands. Antibodies and peptides that inhibit TIM3 are disclosed in WO2013/006490 and US20100247521. Other anti-TIM3 antibodies include humanized versions of RMT3-23 (disclosed in Ngiow et al., 2011, Cancer Res, 71:3540-3551), and clone 8B.2C12 (disclosed in Monney et al., 2002, Nature, 415:536-541). Bi-specific antibodies that inhibit TIM3 and PD-1 are disclosed in US20130156774. In one embodiment, the anti-TIM3 antibody or fragment thereof is an anti-TIM3 antibody molecule as described in US 2015/0218274, entitled “Antibody Molecules to TIM3 and Uses Thereof,” incorporated by reference in its entirety. In one embodiment, the anti-TIM3 antibody molecule includes at least one, two, three, four, five or six CDRs (or collectively all of the CDRs) from a heavy and light chain variable region from an antibody chosen from any of ABTIM3, ABTIM3-hum01, ABTIM3-hum02, ABTIM3-hum03, ABTIM3-hum04, ABTIM3-hum05, ABTIM3-hum06, ABTIM3-hum07, ABTIM3-hum08, ABTIM3-hum09, ABTIM3-hum10, ABTIM3-hum11, ABTIM3-hum12, ABTIM3-hum13, ABTIM3-hum14, ABTIM3-hum15, ABTIM3-hum16, ABTIM3-hum17, ABTIM3-hum18, ABTIM3-hum19, ABTIM3-hum20, ABTIM3-hum21, ABTIM3-hum22, ABTIM3-hum23; or as described in Tables 1-4 of US 2015/0218274; or encoded by the nucleotide sequence in Tables 1-4; or a sequence substantially identical (e.g., at least 80%, 85%, 90%, 92%, 95%, 97%, 98%, 99% or higher identical) to any of the aforesaid sequences, or closely related CDRs, e.g., CDRs which are identical or which have at least one amino acid alteration, but not more than two, three or four alterations (e.g., substitutions, deletions, or insertions, e.g., conservative substitutions).

[1069] In yet another embodiment, the anti-TIM3 antibody molecule comprises at least one, two, three or four variable regions from an antibody described herein, e.g., an antibody chosen from any of ABTIM3, ABTIM3-hum01, ABTIM3-hum02, ABTIM3-hum03, ABTIM3-hum04, ABTIM3-hum05, ABTIM3-hum06, ABTIM3-hum07, ABTIM3-hum08, ABTIM3-hum09, ABTIM3-hum10, ABTIM3-hum11, ABTIM3-hum12, ABTIM3-hum13, ABTIM3-hum14, ABTIM3-hum15, ABTIM3-hum16, ABTIM3-hum17, ABTIM3-hum18, ABTIM3-hum19, ABTIM3-hum20, ABTIM3-hum21, ABTIM3-hum22, ABTIM3-hum23; or as described in Tables 1-4 of US 2015/0218274; or encoded by the nucleotide sequence in Tables 1-4; or a sequence substantially identical (e.g., at least 80%, 85%, 90%, 92%, 95%, 97%, 98%, 99% or higher identical) to any of the aforesaid sequences.

[1070] In other embodiments, the agent which enhances the activity of a CAR-expressing cell is a CEACAM inhibitor (e.g., CEACAM-1, CEACAM-3, and/or CEACAM-5 inhibitor). In one embodiment, the inhibitor of CEACAM is an anti-CEACAM antibody molecule. Exemplary anti-CEACAM-1 antibodies are described in WO 2010/125571, WO 2013/082366 WO 2014/059251 and WO 2014/022332, e.g., a monoclonal antibody 34B1, 26H7, and 5F4; or a recombinant form thereof, as described in, e.g., US 2004/0047858, U.S. Pat. No. 7,132,255 and WO 99/052552. In other embodiments, the anti-CEACAM antibody binds to CEACAM-5 as described in, e.g., Zheng et al. PLoS One. 2010 Sep. 2; 5(9). pii: e12529 (DOI:10:1371/journal.pone.0021146), or crossreacts with CEACAM-1 and CEACAM-5 as described in, e.g., WO 2013/054331 and US 2014/0271618.

[1071] Without wishing to be bound by theory, carcinoembryonic antigen cell adhesion molecules (CEACAM), such as CEACAM-1 and CEACAM-5, are believed to mediate, at least in part, inhibition of an anti-tumor immune response (see e.g., Markel et al. J Immunol. 2002 Mar. 15; 168(6):2803-10; Markel et al. J Immunol. 2006 Nov. 1; 177(9):6062-71; Markel et al. Immunology. 2009 February; 126(2):186-200; Markel et al. Cancer Immunol Immunother. 2010 February; 59(2):215-30; Ortenberg et al. Mol Cancer Ther. 2012 June; 11(6):1300-10; Stern et al. J Immunol. 2005 Jun. 1; 174(11):6692-701; Zheng et al. PLoS One. 2010 Sep. 2; 5(9). pii: e12529). For example, CEACAM-1 has been described as a heterophilic ligand for TIM-3 and as playing a role in TIM-3-mediated T cell tolerance and exhaustion (see e.g., WO 2014/022332; Huang, et al. (2014) Nature doi:10.1038/nature13848). In embodiments, co-blockade of CEACAM-1 and TIM-3 has been shown to enhance an anti-tumor immune response in xenograft colorectal cancer models (see e.g., WO 2014/022332; Huang, et al. (2014), supra). In other embodiments, co-blockade of CEACAM-1 and PD-1 reduce T cell tolerance as described, e.g., in WO 2014/059251. Thus, CEACAM inhibitors can be used with the other immunomodulators described herein (e.g., anti-PD-1 and/or anti-TIM-3 inhibitors) to enhance an immune response against a cancer, e.g., a melanoma, a lung cancer (e.g., NSCLC), a bladder cancer, a colon cancer, an ovarian cancer, and other cancers as described herein.

[1072] LAG3 (lymphocyte activation gene-3 or CD223) is a cell surface molecule expressed on activated T cells and B cells that has been shown to play a role in CD8+ T cell exhaustion. Antibodies, antibody fragments, and other inhibitors of LAG3 and its ligands are available in the art and may be used combination with a CD19 CAR described herein. For example, BMS-986016 (Bristol-Myers Squib) is a monoclonal antibody that targets LAG3. IMP701 (Immutep) is an antagonist LAG3 antibody and IMP731 (Immutep and GlaxoSmithKline) is a depleting LAG3 antibody. Other LAG3 inhibitors include IMP321 (Imrnutep), which is a recombinant fusion protein of a soluble portion of LAG3 and Ig that binds to MHC class II molecules and activates antigen presenting cells (APC). Other antibodies are disclosed, e.g., in WO2010/019570.

[1073] In one embodiment, the anti-LAG3 antibody or fragment thereof is an anti-LAG3 antibody molecule as described in US 2015/0259420, entitled “Antibody Molecules to LAG3 and Uses Thereof,” incorporated by reference in its entirety. In one embodiment, the anti-LAG3 antibody molecule includes at least one, two, three, four, five or six CDRs (or collectively all of the CDRs) from a heavy and light chain variable region from an antibody chosen from any of BAP050-hum01, BAP050-hum02, BAP050-hum03, BAP050-hum04, BAP050-hum05, BAP050-hum06, BAP050-hum07, BAP050-hum08, BAP050-hum09, BAP050-hum10, BAP050-hum11, BAP050-hum12, BAP050-hum13, BAP050-hum14, BAP050-hum15, BAP050-hum16, BAP050-hum17, BAP050-hum18, BAP050-hum19, BAP050-hum20, huBAP050(Ser) (e.g., BAP050-hum01-Ser, BAP050-hum02-Ser, BAP050-hum03-Ser, BAP050-hum04-Ser, BAP050-hum05-Ser, BAP050-hum06-Ser, BAP050-hum07-Ser, BAP050-hum08-Ser, BAP050-hum09-Ser, BAP050-hum10-Ser, BAP050-hum11-Ser, BAP050-hum12-Ser, BAP050-hum13-Ser, BAP050-hum14-Ser, BAP050-hum15-Ser, BAP050-hum18-Ser, BAP050-hum19-Ser, or BAP050-hum20-Ser), BAP050-Clone-F, BAP050-Clone-G, BAP050-Clone-H, BAP050-Clone-I, or BAP050-Clone-J; or as described in Table 1 of US 2015/0259420; or encoded by the nucleotide sequence in Table 1; or a sequence substantially identical (e.g., at least 80%, 85%, 90%, 92%, 95%, 97%, 98%, 99% or higher identical) to any of the aforesaid sequences, or closely related CDRs, e.g., CDRs which are identical or which have at least one amino acid alteration, but not more than two, three or four alterations (e.g., substitutions, deletions, or insertions, e.g., conservative substitutions).

[1074] In yet another embodiment, the anti-LAG3 antibody molecule comprises at least one, two, three or four variable regions from an antibody described herein, e.g., an antibody chosen from any of BAP050-hum01, BAP050-hum02, BAP050-hum03, BAP050-hum04, BAP050-hum05, BAP050-hum06, BAP050-hum07, BAP050-hum08, BAP050-hum09, BAP050-hum10, BAP050-hum11, BAP050-hum12, BAP050-hum13, BAP050-hum14, BAP050-hum15, BAP050-hum16, BAP050-hum17, BAP050-hum18, BAP050-hum19, BAP050-hum20, huBAP050(Ser) (e.g., BAP050-hum01-Ser, BAP050-hum02-Ser, BAP050-hum03-Ser, BAP050-hum04-Ser, BAP050-hum05-Ser, BAP050-hum06-Ser, BAP050-hum07-Ser, BAP050-hum08-Ser, BAP050-hum09-Ser, BAP050-hum10-Ser, BAP050-hum11-Ser, BAP050-hum12-Ser, BAP050-hum13-Ser, BAP050-hum14-Ser, BAP050-hum15-Ser, BAP050-hum18-Ser, BAP050-hum19-Ser, or BAP050-hum20-Ser), BAP050-Clone-F, BAP050-Clone-G, BAP050-Clone-H, BAP050-Clone-I, or BAP050-Clone-J; or as described in Table 1 of US 2015/0259420; or encoded by the nucleotide sequence in Tables 1; or a sequence substantially identical (e.g., at least 80%, 85%, 90%, 92%, 95%, 97%, 98%, 99% or higher identical) to any of the aforesaid sequences.

[1075] In embodiments, the subject is administered an additional agent (in further combination with a CAR-expressing cell, e.g., a CD19 CAR-expressing cell), where the additional agent is an inhibitor of an inhibitory molecule, e.g., checkpoint molecule, e.g., PD-1, PD-L1, CTLA4, TIM3, CEACAM (e.g., CEACAM-1, CEACAM-3 and/or CEACAM-5), LAG3, VISTA, BTLA, TIGIT, LAIR1, CD160, 2B4, CD80, CD86, B7-H3 (CD276), B7-H4 (VTCN1), HVEM (TNFRSF14 or CD270), KIR, A2aR, MHC class I, MHC class II, GAL9, adenosine, or TGF beta. In embodiments, the additional agent is an inhibitor of PD-L1, e.g., FAZ053 (a hIgG4 humanized anti-PD-L1 monoclonal antibody), MPDL3280A, durvalumab (DEMI-4736), avelumab (MSB-0010718C), or BMS-936559. In embodiments, the additional agent is an additional inhibitor of PD-1, e.g., pembrolizumab, nivolumab, PDR001, MEDI-0680 (AMP-514), AMP-224, REGN-2810, or BGB-A317. In embodiments, the additional agent is an inhibitor of CTLA-4, e.g., ipilimumab. In embodiments, the additional agent is an inhibitor of LAG-3, e.g., LAG525 (a hIgG4 humanized anti-LAG-3 monoclonal antibody). In embodiments, the additional agent is an inhibitor of TIM-3, e.g., MBG453 (a hIgG4 humanized anti-TIM-3 monoclonal antibody). In embodiments, the additional agent is an inhibitor of the enzyme, B-Raf, e.g., dabrafenib (GSK2118436; N-{3-[5-(2-aminopyrimidin-4-yl)-2-tert-butyl-1,3-thiazol-4-yl]-2-fluorophenyl}-2,6-difluorobenzenesulfonamide). In embodiments, the additional agent is an inhibitor of MEK1 and/or MEK2, e.g., trametinib (N-(3-{3-Cyclopropyl-5-[(2-fluoro-4-iodophenyl)amino]-6,8-dimethyl-2,4,7-trioxo-3,4,6,7-tetrahydropyrido[4,3-d]pyrimidin-1(2H)-yl}phenyl)acetamide). In embodiments, the additional agent comprises dabrafenib and trametinib. In embodiments, the additional agent is an inhibitor of GITR, e.g., GWN323. In embodiments, the additional agent is an agonist of STING (Stimulator of Interferon Genes), e.g., MIW815. In embodiments, the additional agent is an IL-15 agonist, e.g., NIZ985. In embodiments, the additional agent an inhibitor of adenosine receptor, e.g., NIR178. In embodiments, the additional agent is an inhibitor of macrophage colony stimulating factor (CSF-1), e.g., MCS110. In embodiments, the additional agent is an inhibitor of cMet, e.g., INC280. In embodiments, the additional agent is an inhibitor of porcupine (PORCN), e.g., WNT974. In embodiments, the additional agent is a histone deacetylase inhibitor, e.g., panobinost. In embodiments, the additional agent is an mTOR inhibitor, e.g., everolimus. In embodiments, the additional agent is a second mitochondrial-derived activator of caspases (SMAC) mimetic and/or an inhibitor of IAP (inhibiotor of apoptosis protein) family of proteins, e.g., LCL161. In embodiments, the additional agent is an inhibitor epidermal growth factor receptor (EGFR), e.g., EGF816. In embodiments, the additional agent is an inhibitor of IL-17, e.g., CJM112. In embodiments, the additional agent is an inhibitor of IL-1beta, e.g., ILARIS.

[1076] While not wishing to be bound by theory, in some embodiments, a tumor microenvironment is not conducive to CART cells attacking cancer cells, due to direct or indirect inhibitory effects exerted by the presence of PD-L1+ expressing cells or PD1+ T cells within the tumor microenvironment. More specifically, a tumor microenvironment can comprise tumor cells (which are generally CD19+), immune effector cells (which can be CD3+ T cells and can be PD1+ or PD1-, and which can be endogenous cells or CAR-expressing cells), and activated myeloid cells (which are generally PD-L1+). PD1+ T cells can create a “barrier” around the tumor microenvironment by preventing entry of CART cells the tumor. According to the non-limiting theory herein, pre-administration of a PD1 inhibitor and/or PD-L1 inhibitor makes the tumor microenvironment more favorable to entry of CAR-expressing cells into the tumor microenvironment and effectively clear the target positive cancer cells.

[1077] Accordingly, in certain aspects, the present disclosure provides methods of combination therapy comprising administering to a subject a cell that expresses a CAR molecule that binds CD19, e.g., a CD19 CAR, in combination with a PD1 inhibitor, a PD-L1 inhibitor, or both. In some embodiments, the PD1 inhibitor and/or PD-L1 inhibitor is administered before the CAR therapy. In other embodiments, the PD1 inhibitor and/or PD-L1 inhibitor is administered concurrently with or after the CAR therapy. In some aspects, the subject is a subject having a disease associated with expression of CD19, e.g., a hematologic malignancy, e.g., a leukemia or lymphoma, e.g., DLBCL, e.g. primary DLBCL. In some embodiments, the patient has, or is identified as having, elevated levels of PD1, PDL1, or CD3, or any combination thereof. In some embodiments, the patient has, or is identified as having, or at least 5%, 6%, 7%, 8%, 9%, 10%, 20%, 30%, 40%, 50%, 60%, 70%, 80%, or 90% of DLBCL cells which are positive for CD3 and PD1.

[1078] Also provided herein are methods for monitoring the efficacy of a CAR therapy, e.g., a CD19 CAR therapy. CAR-expressing cells can be administered to a patient's bloodstream with the intent that the cells home to a tumor cell, e.g., infiltrate a tumor. Accordingly, in some embodiments, the method comprises assaying a tumor sample for the presence of CAR-expressing cells. In embodiments, the method comprises detecting a tumor marker, e.g., CD19. In embodiments, the method comprises detecting a marker of a CAR-expressing cell, e.g., a CAR construct or nucleic acid encoding the CAR construct. In embodiments, the method further comprises detecting a T cell marker, e.g., CD3. In some aspects, the subject is a subject having a disease associated with expression of CD19, e.g., a hematologic malignancy, e.g., a leukemia or lymphoma, e.g., DLBCL, e.g. primary DLBCL. In some embodiments, if the CAR-expressing cells show poor infiltration of the tumor, the subject is identified as at an elevated risk of relapse compared to a subject with good infiltration of the tumor. In some embodiments, if the CAR-expressing cells show poor infiltration of the tumor, the subject is administered a PD1 inhibitor and/or PD-L1 inhibitor, e.g., in combination with a second dose of CAR-expressing cells.

[1079] In some embodiments, the agent which enhances the activity of a CAR-expressing cell can be, e.g., a fusion protein comprising a first domain and a second domain, wherein the first domain is an inhibitory molecule, or fragment thereof, and the second domain is a polypeptide that is associated with a positive signal, e.g., a polypeptide comprising an intracellular signaling domain as described herein. In some embodiments, the polypeptide that is associated with a positive signal can include a costimulatory domain of CD28, CD27, ICOS, e.g., an intracellular signaling domain of CD28, CD27 and/or ICOS, and/or a primary signaling domain, e.g., of CD3 zeta, e.g., described herein. In one embodiment, the fusion protein is expressed by the same cell that expressed the CAR. In another embodiment, the fusion protein is expressed by a cell, e.g., a T cell that does not express an anti-CD19 CAR.

[1080] In an embodiment, the method further comprises administering a checkpoint inhibitor. In embodiments, the subject receives a pre-treatment of with an agent, e.g., an mTOR inhibitor, and/or a checkpoint inhibitor, prior to the initiation of a CART therapy. In embodiments, the subject receives concurrent treatment with an agent, e.g., an mTOR inhibitor, and/or a checkpoint inhibitor. In embodiments, the subject receives treatment with an agent, e.g., an mTOR inhibitor, and/or a checkpoint inhibitor, post-CART therapy.

[1081] In embodiments, the determined level or determined characteristic is acquired before, at the same time, or during a course of CART therapy.

[1082] In one embodiment, the agent which enhances activity of a CAR-expressing cell described herein is miR-17-92.

[1083] In one embodiment, the agent which enhances activity of a CAR-described herein is a cytokine. Cytokines have important functions related to T cell expansion, differentiation, survival, and homeostasis. Cytokines that can be administered to the subject receiving a CAR-expressing cell described herein include: IL-2, IL-4, IL-7, IL-9, IL-15, IL-18, and IL-21, or a combination thereof. In embodiments, the cytokine administered is IL-7, IL-15, or IL-21, or a combination thereof. The cytokine can be administered once a day or more than once a day, e.g., twice a day, three times a day, or four times a day. The cytokine can be administered for more than one day, e.g. the cytokine is administered for 2 days, 3 days, 4 days, 5 days, 6 days, 1 week, 2 weeks, 3 weeks, or 4 weeks. For example, the cytokine is administered once a day for 7 days.

[1084] In embodiments, the cytokine is administered in combination with CAR-expressing cells. The cytokine can be administered simultaneously or concurrently with the CAR-expressing cells, e.g., administered on the same day. The cytokine may be prepared in the same pharmaceutical composition as the CAR-expressing cells, or may be prepared in a separate pharmaceutical composition. Alternatively, the cytokine can be administered shortly after administration of the CAR-expressing T cells, e.g., 1 day, 2 days, 3 days, 4 days, 5 days, 6 days, or 7 days after administration of the CAR-expressing cells. In embodiments where the cytokine is administered in a dosing regimen that occurs over more than one day, the first day of the cytokine dosing regimen can be on the same day as administration with the CAR-expressing cells, or the first day of the cytokine dosing regimen can be 1 day, 2 days, 3 days, 4 days, 5 days, 6 days, or 7 days after administration of the CAR-expressing T cells. In one embodiment, on the first day, the CAR-expressing cells are administered to the subject, and on the second day, a cytokine is administered once a day for the next 7 days. In an embodiment, the cytokine to be administered in combination with the CAR-expressing cells is IL-7, IL-15, and/or IL-21.

[1085] In other embodiments, the cytokine is administered a sufficient period of time after administration of the CAR-expressing cells, e.g., at least 2 weeks, 3 weeks, 4 weeks, 6 weeks, 8 weeks, 10 weeks, 12 weeks, 4 months, 5 months, 6 months, 7 months, 8 months, 9 months, 10 months, 11 months, or 1 year or more after administration of CAR-expressing cells. In one embodiment, the cytokine is administered after assessment of the subject's response to the CAR-expressing cells. For example, the subject is administered CAR-expressing cells according to the dosage and regimens described herein. The response of the subject to CART therapy is assessed at 2 weeks, 3 weeks, 4 weeks, 6 weeks, 8 weeks, 10 weeks, 12 weeks, 4 months, 5 months, 6 months, 7 months, 8 months, 9 months, 10 months, 11 months, or 1 year or more after administration of CAR-expressing cells, using any of the methods described herein, including inhibition of tumor growth, reduction of circulating tumor cells, or tumor regression. Subjects that do not exhibit a sufficient response to CART therapy can be administered a cytokine. Administration of the cytokine to the subject that has sub-optimal response to the CART therapy improves CART efficacy and/or anti-tumor activity. In an embodiment, the cytokine administered after administration of CAR-expressing cells is IL-7.

[1086] Further combination therapies may include anti-allergenic agents, anti-emetics, analgesics, adjunct therapies,

[1087] Some patients may experience allergic reactions to the therapeutics described herein and/or other anti-cancer agent(s) during or after administration; therefore, anti-allergic agents are often administered to minimize the risk of an allergic reaction. Suitable anti-allergic agents include corticosteroids, such as dexamethasone (e.g., Decadron®), beclomethasone (e.g., Beclovent®), hydrocortisone (also known as cortisone, hydrocortisone sodium succinate, hydrocortisone sodium phosphate, and sold under the tradenames Ala-Cort®, hydrocortisone phosphate, Solu-Cortef®, Hydrocort Acetate® and Lanacort®), prednisolone (sold under the tradenames Delta-Cortel®, Orapred®, Pediapred® and Prelone®), prednisone (sold under the tradenames Deltasone®, Liquid Red®, Meticorten® and Orasone), methylprednisolone (also known as 6-methylprednisolone, methylprednisolone acetate, methylprednisolone sodium succinate, sold under the tradenames Duralone®, Medralone®, Medrol®, M-Prednisol® and Solu-Medrol®); antihistamines, such as diphenhydramine (e.g., Benadryl®), hydroxyzine, and cyproheptadine; and bronchodilators, such as the beta-adrenergic receptor agonists, albuterol (e.g., Proventil), and terbutaline (Brethine®).

[1088] Some patients may experience nausea during and after administration of the therapeutics described herein and/or other anti-cancer agent(s); therefore, anti-emetics are used in preventing nausea (upper stomach) and vomiting. Suitable anti-emetics include aprepitant (Emend®), ondansetron (Zofran®), granisetron HCl (Kytril®), lorazepam (Ativan®. dexamethasone (Decadron®), prochlorperazine (Compazine®), casopitant (Rezonic® and Zunrisa®), and combinations thereof.

[1089] Medication to alleviate the pain experienced during the treatment period is often prescribed to make the patient more comfortable. Common over-the-counter analgesics, such Tylenol®, are often used. However, opioid analgesic drugs such as hydrocodone/paracetamol or hydrocodone/acetaminophen (e.g., Vicodin®), morphine (e.g., Astramorph® or Avinza®), oxycodone (e.g., OxyContin® or Percocet®), oxymorphone hydrochloride (Opana), and fentanyl (e.g., Duragesic®) are also useful for moderate or severe pain.

[1090] In an effort to protect normal cells from treatment toxicity and to limit organ toxicities, cytoprotective agents (such as neuroprotectants, free-radical scavengers, cardioprotectors, anthracycline extravasation neutralizers, nutrients and the like) may be used as an adjunct therapy. Suitable cytoprotective agents include Amifostine (Ethyol®), glutamine, dimesna (Tavocept®), mesna (Mesnex®), dexrazoxane (Zinecard® or Totect®), xaliproden (Xaprila®), and leucovorin (also known as calcium leucovorin, citrovorum factor and folinic acid).

[1091] The structure of the active compounds identified by code numbers, generic or trade names may be taken from the actual edition of the standard compendium “The Merck Index” or from databases, e.g. Patents International (e.g. IMS World Publications).

[1092] The above-mentioned compounds, which can be used in combination with a compound of the present invention, can be prepared and administered as described in the art, such as in the documents cited above.

[1093] In one embodiment, the present invention provides pharmaceutical compositions comprising at least one compound of the present invention (e.g., a compound of the present invention) or a pharmaceutically acceptable salt thereof together with a pharmaceutically acceptable carrier suitable for administration to a human or animal subject, either alone or together with other anti-cancer agents.

[1094] In one embodiment, the present invention provides methods of treating human or animal subjects suffering from a cellular proliferative disease, such as cancer. The present invention provides methods of treating a human or animal subject in need of such treatment, comprising administering to the subject a therapeutically effective amount of a compound of the present invention (e.g., a compound of the present invention) or a pharmaceutically acceptable salt thereof, either alone or in combination with other anti-cancer agents.

[1095] In particular, compositions will either be formulated together as a combination therapeutic or administered separately.

[1096] In combination therapy, the compound of the present invention and other anti-cancer agent(s) may be administered either simultaneously, concurrently or sequentially with no specific time limits, wherein such administration provides therapeutically effective levels of the two compounds in the body of the patient.

[1097] In a preferred embodiment, the compound of the present invention and the other anti-cancer agent(s) is generally administered sequentially in any order by infusion or orally. The dosing regimen may vary depending upon the stage of the disease, physical fitness of the patient, safety profiles of the individual drugs, and tolerance of the individual drugs, as well as other criteria well-known to the attending physician and medical practitioner(s) administering the combination. The compound of the present invention and other anti-cancer agent(s) may be administered within minutes of each other, hours, days, or even weeks apart depending upon the particular cycle being used for treatment. In addition, the cycle could include administration of one drug more often than the other during the treatment cycle and at different doses per administration of the drug.

[1098] In another aspect of the present invention, kits that include one or more compound of the present invention and a combination partner as disclosed herein are provided. Representative kits include (a) a compound of the present invention or a pharmaceutically acceptable salt thereof, (b) at least one combination partner, e.g., as indicated above, whereby such kit may comprise a package insert or other labeling including directions for administration.

[1099] A compound of the present invention may also be used to advantage in combination with known therapeutic processes, for example, the administration of hormones or especially radiation. A compound of the present invention may in particular be used as a radiosensitizer, especially for the treatment of tumors which exhibit poor sensitivity to radiotherapy.

Combination with a Low, Immune-Enhancing Dose of an mTOR Inhibitor

[1100] In one embodiment, the cells expressing a CAR molecule, e.g., a CAR molecule described herein, are administered in combination with a low, immune enhancing dose of an mTOR inhibitor. For instance, in an embodiment, the combination therapy includes: CD19 CAR expressing cells, a B-cell inhibitor (inhibitor of one or more of CD10, CD20, CD22, CD34, CD123, FLT-3, or ROR1, e.g., a CAR-expressing cell targeting one or more of CD10, CD20, CD22, CD34, CD123, FLT-3, or ROR1), and an mTOR inhibitor. Methods described herein use low, immune enhancing, doses of mTOR inhibitors, e.g., allosteric mTOR inhibitors, including rapalogs such as RAD001. Administration of a low, immune enhancing, dose of an mTOR inhibitor (e.g., a dose that is insufficient to completely suppress the immune system, but sufficient to improve immune function) can optimize the performance of immune effector cells, e.g., T cells or CAR-expressing cells, in the subject. While not wishing to be bound by theory, it is believed that treatment with a low, immune enhancing, dose (e.g., a dose that is insufficient to completely suppress the immune system but sufficient to improve immune function) is accompanied by a decrease in PD-1 positive T cells or an increase in PD-1 negative cells. PD-1 positive T cells, but not PD-1 negative T cells, can be exhausted by engagement with cells which express a PD-1 ligand, e.g., PD-L1 or PD-L2. Additional methods of administering low, immune enhancing dose of an mTOR inhibitor and effects on T cells, e.g., T cells to be endingeered to express a CAR, are described on pages 62-63, 69, 112, and 313-315 of International Application WO 2016/164731, filed Apr. 8, 2016, which is incorporated by reference in its entirety.

[1101] Methods for measuring mTOR inhibition, dosages, treatment regimens, and suitable pharmaceutical compositions are described in U.S. Patent Application No. 2015/01240036, hereby incorporated by reference.

[1102] In an embodiment, administration of a low, immune enhancing, dose of an mTOR inhibitor can result in one or more of the following:
[1103] i) a decrease in the number of PD-1 positive immune effector cells;
[1104] ii) an increase in the number of PD-1 negative immune effector cells;
[1105] iii) an increase in the ratio of PD-1 negative immune effector cells/PD-1 positive immune effector cells;
[1106] iv) an increase in the number of naïve T cells;
[1107] v) an increase in the expression of one or more of the following markers: CD62L^{high}, CD127^{high}, CD27, and BCL2, e.g., on memory T cells, e.g., memory T cell precursors; vi) a decrease in the expression of KLRG1, e.g., on memory T cells, e.g., memory T cell precursors; or
[1108] vii) an increase in the number of memory T cell precursors, e.g., cells with any one or combination of the following characteristics: increased CD62L^{high} increased CD127^{high} increased CD27⁺, decreased KLRG1, and increased BCL2;

[1109] and wherein any of the foregoing, e.g., i), ii), iii), iv), v), vi), or vii), occurs e.g., at least transiently, e.g., as compared to a non-treated subject.

[1110] In another embodiment, administration of a low, immune enhancing, dose of an mTOR inhibitor results in increased or prolonged proliferation or persistence of CAR-expressing cells, e.g., in culture or in a subject, e.g., as compared to non-treated CAR-expressing cells or a non-treated subject. In embodiments, increased proliferation or persistence is associated with in an increase in the number of CAR-expressing cells. The effect of a low dose of RAD001 on CAR T cell proliferation is described, e.g., in Example 18 on pages 557-558 of of International Application WO 2016/164731, filed Apr. 8, 2016, which is incorporated by reference in its entirety, and the effect of low dose RAD001 on CAR T cell expansion in vivo is described, e.g., in Example 19 on pages 558-560 of of International Application WO 2016/164731, filed Apr. 8, 2016, which is incorporated by reference in its entirety.

[1111] In another embodiment, administration of a low, immune enhancing, dose of an mTOR inhibitor results in increased killing of cancer cells by CAR-expressing cells, e.g., in culture or in a subject, e.g., as compared to non-treated CAR-expressing cells or a non-treated subject. In embodiments, increased killing of cancer cells is associated with in a decrease in tumor volume.

[1112] In one embodiment, the cells expressing a CAR molecule, e.g., a CAR molecule described herein, are administered in combination with a low, immune enhancing dose of an mTOR inhibitor, e.g., an allosteric mTOR inhibitor, e.g., RAD001, or a catalytic mTOR inhibitor. For example, administration of the low, immune enhancing, dose of the mTOR inhibitor can be initiated prior to administration of a CAR-expressing cell described herein; completed prior to administration of a CAR-expressing cell described herein; initiated at the same time as administration of a CAR-expressing cell described herein; overlapping with administration of a CAR-expressing cell described herein; or continuing after administration of a CAR-expressing cell described herein.

[1113] Alternatively or in addition, administration of a low, immune enhancing, dose of an mTOR inhibitor can optimize immune effector cells to be engineered to express a CAR molecule described herein. In such embodiments, administration of a low, immune enhancing, dose of an mTOR inhibitor, e.g., an allosteric inhibitor, e.g., RAD001, or a catalytic inhibitor, is initiated or completed prior to harvest of immune effector cells, e.g., T cells or NK cells, to be engineered to express a CAR molecule described herein, from a subject.

[1114] In another embodiment, immune effector cells, e.g., T cells or NK cells, to be engineered to express a CAR molecule described herein, e.g., after harvest from a subject, or CAR-expressing immune effector cells, e.g., T cells or NK cells, e.g., prior to administration to a subject, can be cultured in the presence of a low, immune enhancing, dose of an mTOR inhibitor.

[1115] In an embodiment, administering to the subject a low, immune enhancing, dose of an mTOR inhibitor comprises administering, e.g., once per week, e.g., in an immediate release dosage form, 0.1 to 20, 0.5 to 10, 2.5 to 7.5, 3 to 6, or about 5, mgs of RAD001, or a bioequivalent dose thereof. In an embodiment, administering to the subject a low, immune enhancing, dose of an mTOR inhibitor comprises administering, e.g., once per week, e.g., in a sustained release dosage form, 0.3 to 60, 1.5 to 30, 7.5 to 22.5, 9 to 18, or about 15 mgs of RAD001, or a bioequivalent dose thereof.

[1116] In an embodiment, a dose of an mTOR inhibitor is associated with, or provides, mTOR inhibition of at least 5 but no more than 90%, at least 10 but no more than 90%, at least 15, but no more than 90%, at least 20 but no more than 90%, at least 30 but no more than 90%, at least but no more than 90%, at least 50 but no more than 90%, at least 60 but no more than 90%, at least 70 but no more than 90%, at least 5 but no more than 80%, at least 10 but no more than 80%, at least 15, but no more than 80%, at least 20 but no more than 80%, at least 30 but no more than 80%, at least 40 but no more than 80%, at least 50 but no more than 80%, at least 60 but no more than 80%, at least 5 but no more than 70%, at least 10 but no more than 70%, at least 15, but no more than 70%, at least 20 but no more than 70%, at least 30 but no more than 70%, at least 40 but no more than 70%, at least 50 but no more than 70%, at least 5 but no more than 60%, at least 10 but no more than 60%, at least 15, but no more than 60%, at least 20 but no more than 60%, at least 30 but no more than 60%, at least 40 but no more than 60%, at least 5 but no more than 50%, at least 10 but no more than 50%, at least 15, but no more than 50%, at least 20 but no more than 50%, at least 30 but no more than 50%, at least 40 but no more than 50%, at least 5 but no more than 40%, at least 10 but no more than 40%, at least 15, but no more than 40%, at least 20 but no more than 40%, at least 30 but no more than 40%, at least 35 but no more than 40%, at least 5 but no more than 30%, at least 10 but no more than 30%, at least 15, but no more than 30%, at least 20 but no more than 30%, or at least 25 but no more than 30%.

[1117] The extent of mTOR inhibition can be conveyed as, or corresponds to, the extent of P70 S6 kinase inhibition, e.g., the extent of mTOR inhibition can be determined by the level of decrease in P70 S6 kinase activity, e.g., by the decrease in phosphorylation of a P70 S6 kinase substrate. The level of mTOR inhibition can be evaluated by various methods, such as measuring P70 S6 kinase activity by the Boulay assay, as described in U.S. Patent Application No. 2015/01240036, hereby incorporated by reference, or as described in U.S. Pat. No. 7,727,950, hereby incorporated by reference; measuring the level of phosphorylated S6 by western blot; or evaluating a change in the ratio of PD1 negative immune effector cells to PD1 positive immune effector cells.

[1118] As used herein, the term “mTOR inhibitor” refers to a compound or ligand, or a pharmaceutically acceptable salt thereof, which inhibits the mTOR kinase in a cell. In an embodiment, an mTOR inhibitor is an allosteric inhibitor. Allosteric mTOR inhibitors include the neutral tricyclic compound rapamycin (sirolimus), rapamycin-related compounds, that is compounds having structural and functional similarity to rapamycin including, e.g., rapamycin derivatives, rapamycin analogs (also referred to as rapalogs) and other macrolide compounds that inhibit mTOR activity. In an embodiment, an mTOR inhibitor is a catalytic inhibitor.

[1119] Rapamycin is a known macrolide antibiotic produced by Streptomyces hygroscopicus.See, e.g., McAlpine, J. B., et al., J. Antibiotics (1991) 44: 688; Schreiber, S. L., et al., J. Am. Chem. Soc. (1991) 113: 7433; U.S. Pat. No. 3,929,992. There are various numbering schemes proposed for rapamycin. To avoid confusion, when specific rapamycin analogs are named herein, the names are given with reference to rapamycin using the numbering scheme of formula A.

[1120] Rapamycin analogs useful in the invention are, for example, 0-substituted analogs in which the hydroxyl group on the cyclohexyl ring of rapamycin is replaced by OR₁ in which R₁ is hydroxyalkyl, hydroxyalkoxyalkyl, acylaminoalkyl, or aminoalkyl; e.g. RAD001, also known as everolimus, as described in U.S. Pat. No. 5,665,772 and WO94/09010, the contents of each are incorporated by reference.

[1121] Other suitable rapamycin analogs include those substituted at the 26- or 28-position. The rapamycin analog may be an epimer of an analog mentioned above, particularly an epimer of an analog substituted in position 40, 28 or 26, and may optionally be further hydrogenated, e.g. as described in U.S. Pat. No. 6,015,815, WO95/14023 and WO99/15530 the contents of which are incorporated by reference, e.g. ABT578 also known as zotarolimus or a rapamycin analog described in U.S. Pat. No. 7,091,213, WO98/02441 and WO01/14387 the contents of which are incorporated by reference, e.g. AP23573 also known as ridaforolimus.

[1122] Examples of rapamycin analogs suitable for use in the present invention from U.S. Pat. No. 5,665,772 include, but are not limited to, 40-O-benzyl-rapamycin, 40-O-(4′-hydroxymethyl)benzyl-rapamycin, 40-O-[4′-(1,2-dihydroxyethyl)]benzyl-rapamycin, 40-O-allyl-rapamycin, 40-O-[3′-(2,2-dimethyl-1,3-dioxolan-4(S)-yl)-prop-2′-en-1′-yl]-rapamycin, (2′E,4′S)-40-O-(4′,5′-dihydroxypent-2′-en-1′-yl)-rapamycin, 40-O-(2-hydroxy)ethoxycarbonylmethyl-rapamycin, 40-O-(2-hydroxy)ethyl-rapamycin, 40-O-(3-hydroxy)propyl-rapamycin, 40-O-(6-hydroxy)hexyl-rapamycin, 40-O-[2-(2-hydroxy)ethoxy]ethyl-rapamycin, 40-O-[(3S)-2,2-dimethyldioxolan-3-yl]methyl-rapamycin, 40-O-[(2S)-2,3-dihydroxyprop-1-yl]-rapamycin, 40-O-(2-acetoxy)ethyl-rapamycin, 40-O-(2-nicotinoyloxy)ethyl-rapamycin, 40-O-[2-(N-morpholino)acetoxy]ethyl-rapamycin, 40-O-(2-N-imidazolylacetoxy)ethyl-rapamycin, 40-O-[2-(N-methyl-N′-piperazinyl)acetoxy]ethyl-rapamycin, 39-O-desmethyl-39, 40-O,O-ethylene-rapamycin, (26R)-26-dihydro-40-O-(2-hydroxy)ethyl-rapamycin, 40-O-(2-aminoethyl)-rapamycin, 40-O-(2-acetaminoethyl)-rapamycin, 40-O-(2-nicotinamidoethyl)-rapamycin, 40-O-(2-(N-methyl-imidazo-2′-ylcarbethoxamido)ethyl)-rapamycin, 40-O-(2-ethoxycarbonylaminoethyl)-rapamycin, 40-O-(2-tolylsulfonamidoethyl)-rapamycin and 40-O-[2-(4′,5′-dicarboethoxy-1′,2′,3′-triazol-1′-yl)-ethyl]-rapamycin.

[1123] Other rapamycin analogs useful in the present invention are analogs where the hydroxyl group on the cyclohexyl ring of rapamycin and/or the hydroxy group at the 28 position is replaced with an hydroxyester group are known, for example, rapamycin analogs found in U.S. RE44,768, e.g. temsirolimus.

[1124] Other rapamycin analogs useful in the preset invention include those wherein the methoxy group at the 16 position is replaced with another substituent, e.g., (optionally hydroxy-substituted) alkynyloxy, benzyl, orthomethoxybenzyl or chlorobenzyl and/or wherein the mexthoxy group at the 39 position is deleted together with the 39 carbon so that the cyclohexyl ring of rapamycin becomes a cyclopentyl ring lacking the 39 position methyoxy group; e.g. as described in WO95/16691 and WO96/41807, the contents of which are incorporated by reference. The analogs can be further modified such that the hydroxy at the 40-position of rapamycin is alkylated and/or the 32-carbonyl is reduced.

[1125] Rapamycin analogs from WO95/16691 include, but are not limited to, 16-demthoxy-16-(pent-2-ynyl)oxy-rapamycin, 16-demthoxy-16-(but-2-ynyl)oxy-rapamycin, 16-demthoxy-16-(propargyl)oxy-rapamycin, 16-demethoxy-16-(4-hydroxy-but-2-ynyl)oxy-rapamycin, 16-demthoxy-16-benzyloxy-40-O-(2-hydroxyethyl)-rapamycin, 16-demthoxy-16-benzyloxy-rapamycin, 16-demethoxy-16-ortho-methoxybenzyl-rapamycin, 16-demethoxy-40-O-(2-methoxyethyl)-16-pent-2-ynyl)oxy-rapamycin, 39-demethoxy-40-desoxy-39-formyl-42-nor-rapamycin, 39-demethoxy-40-desoxy-39-hydroxymethyl-42-nor-rapamycin, 39-demethoxy-40-desoxy-39-carboxy-42-nor-rapamycin, 39-demethoxy-40-desoxy-39-(4-methyl-piperazin-1-yl)carbonyl-42-nor-rapamycin, 39-demethoxy-40-desoxy-39-(morpholin-4-yl)carbonyl-42-nor-rapamycin, 39-demethoxy-40-desoxy-39-[N-methyl, N-(2-pyridin-2-yl-ethyl)]carbamoyl-42-nor-rapamycin and 39-demethoxy-40-desoxy-39-(p-toluenesulfonylhydrazonomethyl)-42-nor-rapamycin. Rapamycin analogs from WO96/41807 include, but are not limited to, 32-deoxo-rapamycin, 16-O-pent-2-ynyl-32-deoxo-rapamycin, 16-O-pent-2-ynyl-32-deoxo-40-O-(2-hydroxy-ethyl)-rapamycin, 16-O-pent-2-ynyl-32-(S)-dihydro-40-O-(2-hydroxyethyl)-rapamycin, 32(S)-dihydro-40-O-(2-methoxy)ethyl-rapamycin and 32(S)-dihydro-40-O-(2-hydroxyethyl)-rapamycin.

[1126] Another suitable rapamycin analog is umirolimus as described in US2005/0101624 the contents of which are incorporated by reference.

[1127] RAD001, otherwise known as everolimus (Afinitor®), has the chemical name (1R,9S,12S,15R,16E,18R,19R,21R,23S,24E,26E,28E,30S,32S,35R)-1,18-dihydroxy-12-{(1R)- 2-[(1S,3R,4R)-4-(2-hydroxyethoxy)-3-methoxycyclohexyl]-1-methylethyl}-19,30-dimethoxy-15,17,21,23,29,35-hexamethyl-11,36-dioxa-4-aza-tricyclo[30.3.1.04,9]hexatriaconta-16,24,26,28-tetraene-2,3,10,14,20-pentaone, as described in U.S. Pat. No. 5,665,772 and WO94/09010, the contents of each are incorporated by reference.

[1128] Further examples of allosteric mTOR inhibitors include sirolimus (rapamycin, AY-22989), 40-[3-hydroxy-2-(hydroxymethyl)-2-methylpropanoate]-rapamycin (also called temsirolimus or CCI-779) and ridaforolimus (AP-23573/MK-8669). Other examples of allosteric mTor inhibitors include zotarolimus (ABT578) and umirolimus.

[1129] Alternatively or additionally, catalytic, ATP-competitive mTOR inhibitors have been found to target the mTOR kinase domain directly and target both mTORC1 and mTORC2. These are also more effective inhibitors of mTORC1 than such allosteric mTOR inhibitors as rapamycin, because they modulate rapamycin-resistant mTORC1 outputs such as 4EBP1-T37/46 phosphorylation and cap-dependent translation.

[1130] Catalytic inhibitors include: BEZ235 or 2-methyl-2-[4-(3-methyl-2-oxo-8-quinolin-3-yl-2,3-dihydro-imidazo[4,5-c]quinolin-1-yl)-phenyl]-propionitrile, or the monotosylate salt form (the synthesis of BEZ235 is described in WO2006/122806); CCG168 (otherwise known as AZD-8055, Chresta, C. M., et al., Cancer Res, 2010, 70(1), 288-298) which has the chemical name {5-[2,4-bis-((S)-3-methyl-morpholin-4-yl)-pyrido[2,3d]pyrimidin-7-yl]-2-methoxy-phenyl}-methanol; 3-[2,4-bis[(3S)-3-methylmorpholin-4-yl]pyrido[2,3-d]pyrimidin-7-yl]-N-methylbenzamide (WO09104019); 3-(2-aminobenzo[d]oxazol-5-yl)-1-isopropyl-1H-pyrazolo[3,4-d]pyrimidin-4-amine (WO10051043 and WO2013023184); A N-(3-(N-(3-((3,5-dimethoxyphenyl)amino)quinoxaline-2-yl)sulfamoyl)phenyl)-3-methoxy-4-methylbenzamide (WO07044729 and WO12006552); PKI-587 (Venkatesan, A. M., J. Med. Chem., 2010, 53, 2636-2645) which has the chemical name 1-[4-[4-(dimethylamino)piperidine-1-carbonyl]phenyl]-3-[4-(4,6-dimorpholino-1,3,5-triazin-2-yl)phenyl]urea; GSK-2126458 (ACS Med. Chem. Lett., 2010, 1, 39-43) which has the chemical name 2,4-difluoro-N-{2-methoxy-5-[4-(4-pyridazinyl)-6-quinolinyl]-3-pyridinyl}benzenesulfonamide; 5-(9-isopropyl-8-methyl-2-morpholino-9H-purin-6-yl)pyrimidin-2-amine (WO10114484); and (E)-N-(8-(6-amino-5-(trifluoromethyl)pyridin-3-yl)-1-(6-(2-cyanopropan-2-yl)pyridin-3-yl)-3-methyl-iH-imidazo[4,5-c]quinolin-2(3H)-ylidene)cyanamide (WO12007926).

[1131] Further examples of catalytic mTOR inhibitors include 8-(6-methoxy-pyridin-3-yl)-3-methyl-1-(4-piperazin-1-yl-3-trifluoromethyl-phenyl)-1,3-dihydro-imidazo[4,5-c]quinolin-2-one (WO2006/122806) and Ku-0063794 (Garcia-Martinez J M, et al., Biochem J., 2009, 421(1), 29-42. Ku-0063794 is a specific inhibitor of the mammalian target of rapamycin (mTOR).) WYE-354 is another example of a catalytic mTOR inhibitor (Yu K, et al. (2009). Biochemical, Cellular, and In vivo Activity of Novel ATP-Competitive and Selective Inhibitors of the Mammalian Target of Rapamycin. Cancer Res. 69(15): 6232-6240).

[1132] mTOR inhibitors useful according to the present invention also include prodrugs, derivatives, pharmaceutically acceptable salts, or analogs thereof of any of the foregoing. mTOR inhibitors, such as RAD001, may be formulated for delivery based on well-established methods in the art based on the particular dosages described herein. In particular, U.S. Pat. No. 6,004,973 (incorporated herein by reference) provides examples of formulations useable with the mTOR inhibitors described herein.

### Methods and Biomarkers for Evaluating CAR-Effectiveness or Sample Suitability

[1133] The present disclosure provides, among other things, gene signatures that indicate whether a cancer patient treated with a CAR therapy is likely to relapse, or has relapsed. Without wishing to be bound by theory, an experimental basis for this gene signature is set out in Example 12 on pages 528-532 of International Application WO 2016/164731, filed Apr. 8, 2016, which is incorporated by reference in its entirety.

[1134] In an embodiment, novel transcriptional gene signatures described e.g., in Table 29 (on page 530 International Application WO 2016/164731, filed Apr. 8, 2016, which is incorporated by reference in its entirety), are used to enable manufactured product improvements, thereby reducing the likelihood of patient relapse. In an embodiment, gene signatures described herein are used to modify therapeutic application of manufactured product, thereby reducing the likelihood of patient relapse.

[1135] In an embodiment, gene signatures described e.g., in Table 29 (on page 530 International Application WO 2016/164731, filed Apr. 8, 2016, which is incorporated by reference in its entirety) are identified in a subject prior to treatment with a CAR-expressing cell, e.g., CART treatment (e.g., a CART19 treatment, e.g., CTL019 therapy) that predict relapse to CAR treatment. In an embodiment, gene signatures described herein are identified in an apheresis sample or bone marrow sample. In an embodiment, gene signatures described herein are identified in a manufactured CAR-expressing cell product, e.g., CART product (e.g., a CART19 product, e.g., CTL019) prior to infusion.

[1136] In embodiments, a method of using the compositions described herein comprises assaying a gene signature that indicates whether a subject treated with the cell is likely to relapse, or has relapsed. In embodiments, the method comprises assaying the gene signature in the cell prior to infusion into the subject. In embodiments, the method further comprises decreasing the T_{REG} signature of a population of cells comprising the transduced cell. In embodiments, decreasing the T_{REG} signature comprises performing CD25-depletion on the population of cells.

[1137] In embodiments, a method comprises assaying a gene signature that indicates whether the subject is likely to relapse, or has relapsed. In embodiments, the method comprises assaying a gene signature in a subject prior to treatment with a CAR-expressing cell, e.g., CART treatment (e.g., a CART19 treatment, e.g., CTL019 therapy) that predicts relapse to CAR treatment. In embodiments, the level of one or more markers is the level of at least 2, 3, 4, 5, 6, 7, 8, 9, or 10 markers listed in Table 29 (on page 530 International Application WO 2016/164731, filed Apr. 8, 2016, which is incorporated by reference in its entirety). In embodiments, the level of the marker comprises an mRNA level or a level of a soluble protein.

[1138] This disclosure also provides evidence, for instance in Example 12, on pages 528-532 of International Application WO 2016/164731, filed Apr. 8, 2016, which is incorporated by reference in its entirety, that (without wishing to be bound by theory) decreasing the T_{REG} signature in the patient prior to apheresis or during manufacturing of the CART product reduces the risk of patient relapse.

[1139] In an embodiment, a patient is pre-treated with one or more therapies that reduce T_{REG} cells prior to collection of cells for CAR product manufacturing, e.g., CART product manufacturing, thereby reducing the risk of patient relapse to CAR-expressing cell treatment (e.g., CTL019 treatment). Methods of decreasing T_{REG} cells include, but are not limited to, cyclophosphamide, anti-GITR antibody, CD25-depletion, and combinations thereof.

[1140] In an embodiment, a patient is pre-treated with cyclophosphamide or an anti-GITR antibody prior to collection of cells for CAR-expressing cell product manufacturing, thereby reducing the risk of patient relapse to CAR-expressing cell treatment (e.g., CTL019 treatment).

[1141] In an embodiment, the CAR-expressing cell manufacturing process is modified to deplete T_{REG} cells prior to manufacturing of the CAR-expressing cell product (e.g., a CTL019 product). In an embodiment, CD25-depletion is used to deplete T_{REG} cells prior to manufacturing of the CAR-expressing cell product (e.g., a CTL019 product).

[1142] In an embodiment, after treating a patient or a CAR-expressing cell product with a treatment that reduces T_{REG} cells, the patient is treated with a combination therapy. The combination therapy may comprise, e.g., a CD19 inhibitor such as a CD19 CAR-expressing cell, and one or more B-cell inhibitors, e.g., B-cell inhibitors as described herein.

[1143] In an embodiment, a patient is assayed for the level of T_{REG} cells in a patient sample, e.g., a sample comprising cancer cells and/or a sample representing a tumor microenvironment. In an embodiment, this information is used to determine a course of treatment for the patient. For instance, in an embodiment, if the patient is identified as having elevated levels of T_{REG} cells compared to a control, the therapy comprises administering a treatment other than a CAR-expressing cell. For instance, the therapy may comprise administration of an antibody molecule, administration of a small molecule therapeutic, surgery, or radiation therapy, or any combination thereof. This therapy may target one or more B-cell antigens.

[1144] In embodiments, the characteristic of CD19 is a mutation in exon 2, e.g., a mutation causing a frameshift or a premature stop codon or both. In embodiments, the level of T_{REG} cells is determined by staining a sample for a marker expressed by T_{REG} cells. In embodiments, the level of T_{REG} cells is the level of Treg cells in a relevant location in the subject's body, e.g., in a cancer microenvironment.

[1145] In an embodiment, a relapser is a patient having, or who is identified as having, an increased level of expression (e.g., increase in RNA levels) of one or more of (e.g., 2, 3, 4, or all of) the following genes, compared to non relapsers: MIR199A1, MIR1203, uc02lovp, ITM2C, and HLA-DQB1 and/or a decreased levels of expression (e.g., decrease in RNA levels) of one or more of (e.g., 2, 3, 4, 5, 6, 7, 8, 9, 10, 11, or all of) the following genes, compared to non relapsers: PPIAL4D, TTTY10, TXLNG2P, MIR4650-1, KDM5D, USP9Y, PRKY, RPS4Y2, RPS4Y1, NCRNA00185, SULTiE1, and EIF1AY.

[1146] In another aspect, the invention features a method of evaluating or monitoring the effectiveness of a CAR-expressing cell therapy, in a subject (e.g., a subject having a cancer), or the suitability of a sample (e.g., an apheresis sample) for a CAR therapy, e.g., therapy including administration of a low, immune-enhancing dose of an mTOR inhibitor. The method includes acquiring a value of effectiveness to the CAR therapy, or sample suitability, wherein said value is indicative of the effectiveness or suitability of the CAR-expressing cell therapy.

[1147] In embodiments, the value of effectiveness to the CAR therapy, or sample suitability, comprises a measure of one, two, three, four, five, six or more (all) of the following:

[1148] (i) the level or activity of one, two, three, or more (e.g., all) of resting T_{EFF} cells, resting T_{REG} cells, younger T cells (e.g., younger CD4 or CD8 cells, or gamma/delta T cells), or early memory T cells, or a combination thereof, in a sample (e.g., an apheresis sample or a manufactured CAR-expressing cell product sample);

[1149] (ii) the level or activity of one, two, three, or more (e.g., all) of activated T_{EFF} Cells, activated T_{REG} ells, older T cells (e.g., older CD4 or CD8 cells), or late memory T cells, or a combination thereof, in a sample (e.g., an apheresis sample or a manufactured CAR-expressing cell product sample);

[1150] (iii) the level or activity of an immune cell exhaustion marker, e.g., one, two or more immune checkpoint inhibitors (e.g., PD-1, PD-L1, TIM-3 and/or LAG-3) in a sample (e.g., an apheresis sample or a manufactured CAR-expressing cell product sample). In one embodiment, an immune cell has an exhausted phenotype, e.g., co-expresses at least two exhaustion markers, e.g., co-expresses PD-1 and TIM-3. In other embodiments, an immune cell has an exhausted phenotype, e.g., co-expresses at least two exhaustion markers, e.g., co-expresses PD-1 and LAG-3;

[1151] (iv) the level or activity of CD27 and/or CD45RO− (e.g., CD27+CD45RO−) immune effector cells, e.g., in a CD4+ or a CD8+ T cell population, in a sample (e.g., an apheresis sample or a manufactured CAR-expressing cell product sample);

[1152] (v) the level or activity of one, two, three, four, five, ten, twelve or more of the biomarkers chosen from CCL20, IL-17a and/or IL-6, PD-1, PD-L1, LAG-3, TIM-3, CD57, CD27, CD122, CD62L, KLRG1;

[1153] (vi) a cytokine level or activity (e.g., quality of cytokine repertoire) in a CAR-expressing cell product sample; or

[1154] (vii) a transduction efficiency of a CAR-expressing cell in a manufactured CAR-expressing cell product sample.

[1155] In some embodiments of any of the methods disclosed herein, the CAR-expressing cell therapy comprises a plurality (e.g., a population) of CAR-expressing immune effector cells, e.g., a plurality (e.g., a population) of T cells or NK cells, or a combination thereof. In one embodiment, the CAR-expressing cell therapy includes administration of a low, immune-enhancing dose of an mTOR inhibitor.

[1156] In some embodiments of any of the methods disclosed herein, the measure of one or more of (i)-(vii) is obtained from an apheresis sample acquired from the subject. The apheresis sample can be evaluated prior to infusion or re-infusion.

[1157] In some embodiments of any of the methods disclosed herein, the measure of one or more of (i)-(vii) is obtained from a manufactured CAR-expressing cell product sample. The manufactured CAR-expressing cell product can be evaluated prior to infusion or re-infusion.

[1158] In some embodiments of any of the methods disclosed herein, the subject is evaluated prior to receiving, during, or after receiving, the CAR-expressing cell therapy.

[1159] In some embodiments of any of the methods disclosed herein, the measure of one or more of (i)-(vii) evaluates a profile for one or more of gene expression, flow cytometry or protein expression.

[1160] In some embodiments of any of the methods disclosed herein, the method further comprises identifying the subject as a responder, a non-responder, a relapser or a non-relapser, based on a measure of one or more of (i)-(vii).

[1161] In some embodiments of any of the methods disclosed herein, a responder (e.g., a complete responder) has, or is identified as having, a greater level or activity of one, two, or more (all) of GZMK, PPF1BP2, or naïve T cells as compared to a non-responder.

[1162] In some embodiments of any of the methods disclosed herein, a non-responder has, or is identified as having, a greater level or activity of one, two, three, four, five, six, seven, or more (e.g., all) of IL22, IL-2RA, IL-21, IRF8, IL8, CCL17, CCL22, effector T cells, or regulatory T cells, as compared to a responder.

[1163] In an embodiment, a relapser is a patient having, or who is identified as having, an increased level of expression of one or more of (e.g., 2, 3, 4, or all of) the following genes, compared to non relapsers: MIR199A1, MIR1203, uc02lovp, ITM2C, and HLA-DQB1 and/or a decreased levels of expression of one or more of (e.g., 2, 3, 4, 5, 6, 7, 8, 9, 10, 11, or all of) the following genes, compared to non relapsers: PPIAL4D, TTTY10, TXLNG2P, MIR4650-1, KDM5D, USP9Y, PRKY, RPS4Y2, RPS4Y1, NCRNA00185, SULTiE1, and EIF1AY.

[1164] In some embodiments of any of the methods disclosed herein, a complete responder has, or is identified as having, a greater, e.g., a statistically significant greater, percentage of CD8+ T cells compared to a reference value, e.g., a non-responder percentage of CD8+ T cells.

[1165] In some embodiments of any of the methods disclosed herein, a complete responder has, or is identified as having, a greater percentage of CD27+CD45RO− immune effector cells, e.g., in the CD8+ population, compared to a reference value, e.g., a non-responder number of CD27+CD45RO− immune effector cells.

[1166] In some embodiments of any of the methods disclosed herein, a complete responder or a partial responder has, or is identified as having, a greater, e.g., a statistically significant greater, percentage of CD4+ T cells compared to a reference value, e.g., a non-responder percentage of CD4+ T cells.

[1167] In some embodiments of any of the methods disclosed herein, a complete responder has, or is identified as having, a greater percentage of one, two, three, or more (e.g., all) of resting TEFF cells, resting T_{REG} cells, younger T cells (e.g., younger CD4 or CD8 cells, or gamma/delta T cells), or early memory T cells, or a combination thereof, compared to a reference value, e.g., a non-responder number of resting T_{EFF} cells, resting T_{REG} cells, younger T cells (e.g., younger CD4 or CD8 cells), or early memory T cells.

[1168] In some embodiments of any of the methods disclosed herein, a non-responder has, or is identified as having, a greater percentage of one, two, three, or more (e.g., all) of activated T_{EFF} cells, activated T_{REG} ells, older T cells (e.g., older CD4 or CD8 cells), or late memory T cells, or a combination thereof, compared to a reference value, e.g., a responder number of activated T_{EFF} cells, activated T_{REG} ells, older T cells (e.g., older CD4 or CD8 cells), or late memory T cells.

[1169] In some embodiments of any of the methods disclosed herein, a non-responder has, or is identified as having, a greater percentage of an immune cell exhaustion marker, e.g., one, two or more immune checkpoint inhibitors (e.g., PD-1, PD-L1, TIM-3 and/or LAG-3). In one embodiment, a non-responder has, or is identified as having, a greater percentage of PD-1, PD-L1, or LAG-3 expressing immune effector cells (e.g., CD4+ T cells and/or CD8+ T cells) (e.g., CAR-expressing CD4+ cells and/or CD8+ T cells) compared to the percentage of PD-1 or LAG-3 expressing immune effector cells from a responder.

[1170] In one embodiment, a non-responder has, or is identified as having, a greater percentage of immune cells having an exhausted phenotype, e.g., immune cells that co-express at least two exhaustion markers, e.g., co-expresses PD-1, PD-L1 and/or TIM-3. In other embodiments, a non-responder has, or is identified as having, a greater percentage of immune cells having an exhausted phenotype, e.g., immune cells that co-express at least two exhaustion markers, e.g., co-expresses PD-1 and LAG-3.

[1171] In some embodiments of any of the methods disclosed herein, a non-responder has, or is identified as having, a greater percentage of PD-1/PD-L1+/LAG-3+ cells in the CAR-expressing cell population compared to a responder (e.g., a complete responder) to the CAR-expressing cell therapy.

[1172] In some embodiments of any of the methods disclosed herein, a partial responder has, or is identified as having, a higher percentages of PD-1/PD-L1+/LAG-3+ cells, than a responder, in the CAR-expressing cell population.

[1173] In some embodiments of any of the methods disclosed herein, a non-responder has, or is identified as having, an exhausted phenotype of PD1/PD-L1+ CAR+ and co-expression of LAG3 in the CAR-expressing cell population.

[1174] In some embodiments of any of the methods disclosed herein, a non-responder has, or is identified as having, a greater percentage of PD-1/PD-L1+/TIM-3+ cells in the CAR-expressing cell population compared to the responder (e.g., a complete responder).

[1175] In some embodiments of any of the methods disclosed herein, a partial responders has, or is identified as having, a higher percentage of PD-1/PD-L1+/TIM-3+ cells, than responders, in the CAR-expressing cell population.

[1176] In some embodiments of any of the methods disclosed herein, the presence of CD8+CD27+CD45RO− T cells in an apheresis sample is a positive predictor of the subject response to a CAR-expressing cell therapy.

[1177] In some embodiments of any of the methods disclosed herein, a high percentage of PD1+ CAR+ and LAG3+ or TIM3+ T cells in an apheresis sample is a poor prognostic predictor of the subject response to a CAR-expressing cell therapy.

[1178] In some embodiments of any of the methods disclosed herein, the responder (e.g., the complete or partial responder) has one, two, three or more (or all) of the following profile:

[1179] (i) has a greater number of CD27+ immune effector cells compared to a reference value, e.g., a non-responder number of CD27+ immune effector cells;

[1180] (ii) has a greater number of CD8+ T cells compared to a reference value, e.g., a non-responder number of CD8+ T cells;

[1181] (iii) has a lower number of immune cells expressing one or more checkpoint inhibitors, e.g., a checkpoint inhibitor chosen from PD-1, PD-L1, LAG-3, TIM-3, or KLRG-1, or a combination, compared to a reference value, e.g., a non-responder number of cells expressing one or more checkpoint inhibitors; or

[1182] (iv) has a greater number of one, two, three, four or more (all) of resting TEFF cells, resting T_{REG} cells, naïve CD4 cells, unstimulated memory cells or early memory T cells, or a combination thereof, compared to a reference value, e.g., a non-responder number of resting TEFF cells, resting T_{REG} cells, naïve CD4 cells, unstimulated memory cells or early memory T cells.

[1183] In some embodiments of any of the methods disclosed herein, the cytokine level or activity of (vi) is chosen from one, two, three, four, five, six, seven, eight, or more (or all) of cytokine CCL20/MIP3a, IL17A, IL6, GM-CSF, IFNγ, IL10, IL13, IL2, IL21, IL4, IL5, IL9 or TNFα, or a combination thereof. The cytokine can be chosen from one, two, three, four or more (all) of IL-17a, CCL20, IL2, IL6, or TNFα. In one embodiment, an increased level or activity of a cytokine is chosen from one or both of IL-17a and CCL20, is indicative of increased responsiveness or decreased relapse.

[1184] In some embodiments of any of the methods disclosed herein, a transduction efficiency of 15% or higher in (vii) is indicative of increased responsiveness or decreased relapse.

[1185] In some embodiments of any of the methods disclosed herein, a transduction efficiency of less than 15% in (vii) is indicative of decreased responsiveness or increased relapse.

[1186] In embodiments, the responder, a non-responder, a relapser or a non-relapser identified by the methods herein can be further evaluated according to clinical criteria. For example, a complete responder has, or is identified as, a subject having a disease, e.g., a cancer, who exhibits a complete response, e.g., a complete remission, to a treatment. A complete response may be identified, e.g., using the NCCN Guidelines® (which are incorporated by reference herein in their entireties), as described herein. A partial responder has, or is identified as, a subject having a disease, e.g., a cancer, who exhibits a partial response, e.g., a partial remission, to a treatment. A partial response may be identified, e.g., using the NCCN Guidelines®, as described herein. A non-responder has, or is identified as, a subject having a disease, e.g., a cancer, who does not exhibit a response to a treatment, e.g., the patient has stable disease or progressive disease. A non-responder may be identified, e.g., using the NCCN Guidelines®, as described herein.

[1187] Alternatively, or in combination with the methods disclosed herein, responsive to said value, performing one, two, three, four or more of:

[1188] administering e.g., to a responder or a non-relapser, a CAR-expressing cell therapy;

[1189] administered an altered dosing of a CAR-expressing cell therapy;

[1190] altering the schedule or time course of a CAR-expressing cell therapy;

[1191] administering, e.g., to a non-responder or a partial responder, an additional agent in combination with a CAR-expressing cell therapy, e.g., a checkpoint inhibitor, e.g., a checkpoint inhibitor described herein;

[1192] administering to a non-responder or partial responder a therapy that increases the number of younger T cells in the subject prior to treatment with a CAR-expressing cell therapy;

[1193] modifying a manufacturing process of a CAR-expressing cell therapy, e.g., enriching for younger T cells prior to introducing a nucleic acid encoding a CAR, or increasing the transduction efficiency, e.g., for a subject identified as a non-responder or a partial responder;

[1194] administering an alternative therapy, e.g., for a non-responder or partial responder or relapser; or

[1195] if the subject is, or is identified as, a non-responder or a relapser, decreasing the T_{REG} cell population and/or T_{REG} gene signature, e.g., by one or more of CD25 depletion, administration of cyclophosphamide, anti-GITR antibody, or a combination thereof.

[1196] In certain embodiments, the subject is pre-treated with an anti-GITR antibody. In certain embodiment, the subject is treated with an anti-GITR antibody prior to infusion or re-infusion.

[1197] In some embodiments of the methods described herein, imaging with FDG-PET/CT (PET/CT) is performed on a subject who has been treated with a CAR therapy. This measurement can predict response to the therapy. For instance, in embodiments, metabolically active tumor volume (MTV) and/or [11F]-2-fluoro-2-deoxy-D-glucose (FDG) uptake are measured. In embodiments, a decrease in MTV is indicative of response, e.g., CR (complete response) or PR (partial response), e.g., a post-treatment MTV value of about 0 is indicative of CR, while an increase in MTV is indicative of PD (progressive disease). In embodiments, a decrease in FDG uptake is indicative of response, e.g., CR or PR, while an increase in FDG uptake is indicative of PD. In embodiments, the imaging is performed after administration of the CAR therapy, e.g., about 1 week, 2 weeks, 3 weeks, 4 weeks, 1 month, 2 months, 3 months, 4 months, 5 months, or 6 months after administration of the CAR therapy. In embodiments, the imaging is performed on a subject who does not have symptoms of CRS (cytokine release syndrome), e.g., a patient who suffered from CRS and whose symptoms resolved prior to imaging. In embodiments, the imaging is performed on a subject who has symptoms of CRS. In embodiments, imaging is performed prior to CAR therapy, and the pre-therapy image is compared to a post-therapy image. In embodiments, the subject has a cancer, e.g., lymphoma, e.g., diffuse large B-cell lymphoma (DLBCL) or follicular lymphoma (FL). In some embodiments, the CAR therapy comprises a CAR19-expressing cell, e.g., murine CTL019 or humanized CTL119 as described herein, e.g., Tables 2-3. In some embodiments, the CAR therapy comprises a CAR therapy described herein, e.g., a CAR20-expressing cell, a CAR22-expressing cell, or a CAR19-expressing cell, optionally in combination with a B-cell therapy.

### Personalized Medicine (Theranostics)

[1198] CD19 Characteristics, e.g. Mutations

[1199] Without wishing to be bound by theory, some cancer patients show an initial response to a CD19 inhibitor such as a CD19 CAR-expressing cell, and then relapse. In some embodiments, the relapse is caused (at least in part) by a frameshift and/or premature stop codon in CD19 in the cancer cells, or other change in the expression (including expression levels) of CD19 which reduces the ability of a CD19 CAR-expressing cell to target the cancer cells. Such a mutation can reduce the effectiveness of the CD19 therapy and contribute to the patient's relapse. Accordingly, in some embodiments, it can be beneficial when a CD19 therapy is supplemented or replaced with a therapy directed to a second, different target, e.g., a target expressed in B-cells, e.g., one or more of CD10, CD20, CD22, CD34, CD123, FLT-3, or ROR1. Various exemplary combination therapies of this type are disclosed herein.

[1200] This application discloses, among other things, methods for treating a subject having cancer comprising one or more of: (1) determining if a subject has a difference, e.g., statistically significant difference, in a characteristic of CD19 relative to a reference characteristic, and (2) if there is a difference between the determined characteristic and reference characteristic, administering to the subject a therapeutically effective dose of a CAR therapy, e.g., CART, thereby treating the subject. The patient may be, e.g., a patient who has relapsed after treatment with a CD19 inhibitor, e.g., a CD19 CAR expressing cell. The patient may be a patient who has received or is receiving a CD19 CAR therapy and is at risk of relapse. The patient may be a non-responder to a CD19 CAR therapy.

[1201] In embodiments, the one or more cells that express a CAR molecule that binds CD19 are administered concurrently with, before, or after the one or more B-cell inhibitors.

[1202] In embodiments, the subject has or is identified as having a difference, e.g., a statistically significant difference, between a determined level compared to a reference level of one or more markers listed in Table 29 (on page 530 of International Application WO 2016/164731, filed Apr. 8, 2016, which is incorporated by reference in its entirety) in a biological sample.

[1203] In embodiments, the subject has or is identified as having a difference between a determined characteristic compared to a reference characteristic, in a characteristic of CD19, e.g., a mutation causing a frameshift or a premature stop codon or both, in a biological sample.

[1204] In embodiments, the subject has or is identified as having a difference, e.g., a statistically significant difference, between a determined level compared to a reference level of Treg cells in a biological sample.

[1205] Additional characteristics that can be measured to determine a therapeutically effective dose of CAR therapy are described in pages 8-13, and 64-65 of International Application WO 2016/164731, filed Apr. 8, 2016, which is incorporated by reference in its entirety

[1206] The characteristic can be, e.g., a CD19 sequence, e.g., protein or nucleic acid sequence. The sequence can be determined, e.g., as described in the Examples, by high throughput nucleic acid sequencing, or by mass spectrometry of proteins. As described in the Example herein, a patient may relapse after CD19 CART therapy because of mutations in CD19, e.g., in exon 2 of CD19, e.g., a mutation that causes a frameshift and a premature stop codon in CD19. In embodiments, the insertion or deletion does not cause one or both of a frameshift and a premature stop codon. The mutation may be, e.g., an insertion, a deletion, a substitution, a translocation, or a combination of any of the foregoing. The insertion, deletion, or substitution may involve, e.g., at least 1, 2, 3, 4, 5, 10, 15, 20, 20, or 50 nucleotides. The insertion, deletion, or substitution may involve, e.g., at most 2, 3, 4, 5, 10, 15, 20, 20, 50, or 100 nucleotides. In some cases, a population of cells will comprise more than one mutation. In such cases, the mutations can be in overlapping or non-overlapping sub-populations of cells.

[1207] In some cases a patient is identified as having a CD19 characteristic that reduces CD19's ability to engage with a CD19 inhibitor such as a CD19 CAR expressing cell. Such a characteristic may be, e.g., a frameshift mutation, a premature stop codon, an alteration in nucleic acid sequence or an alteration in the structure of the primary mRNA transcript. The characteristic may be, e.g., a departure from normal production of CD19 that occurs earlier than splicing. The characteristic may be, e.g., a characteristic other than exon skipping. Such patients may be treated with an inhibitor of another target, e.g., a B-cell inhibitor, for example a CAR expressing cell directed against another epitope, e.g., an epitope within one or more of CD10, CD20, CD22, CD34, CD123, FLT-3, or ROR1.

[1208] In some cases, a patient is identified as having a CD19 characteristic that reduces CD19's ability to engage with a CD19 inhibitor, such as a CD19 CAR expressing cell, but does not reduce or abrogate CD19's ability to engage with a second CD19 inhibitor, such as a CD19 inhibitor that binds to a different region on CD19. Such a characteristic may be, e.g., a mutation that does not cause one or both of a frameshift mutation or a premature stop codon. Such a characteristic may be, e.g., an alteration in nucleic acid sequence or an alteration in the structure of the primary mRNA transcript, a departure from normal production of CD19 that occurs earlier than splicing, or a characteristic other than exon skipping. Such patients may be treated with an inhibitor of CD19, e.g., a B-cell inhibitor directed against an intact region of CD19, e.g., a wild-type portion of CD19. For instance, if a mutation is present in exon 2, the second CD19 inhibitor may bind to an exon other than exon 2, or a part of exon 2 that lacks the mutation. The second CD19 inhibitor may be, e.g., a CD19 inhibitor described herein.

[1209] T_{EFF} AND T_{REG} Signatures

[1210] Methods herein can include steps of determining a T_{REG} signature or determining the levels of T_{EFF} cells or T_{REG} ells, e.g., in a patient or in a population of cells e.g., immune cells. Methods herein can also include steps of reducing the level of T_{REG} cells, or decreasing a T_{REG} signature, in a patient or in a population of cells. In some embodiments, a T_{EFF} is a cell with upregulated expression of one or more (e.g., at least 10, 20, 30, 40, 50, 60, 70, 80, or all) of the following genes: AIM2, ALAS1, B4GALT5, BATF, C3orf26, C4orf43, CCL3, CCL4, CCT3, CCT7, CD40LG, CHAC2, CSF2, CTNNA1, EBNA1BP2, EDARADD, EEF1E1, EIF2B3, EIF2S1, FABP5, FAM40B, FKBP4, FOSL1, GFOD1, GLRX2, HSPD1, HSPE1, IFNG, IL15RA, IL21, IL2RA, IL3, KCNK5, KIAA0020, LARP4, LRP8, LTA, MANF, MIR1182, MIR155, MIR155HG, MTCH2, MYOF, NDUFAF1, NLN, NME1, NME1-NME2, OTUD7B, PAM, PDIA6, PEA15, PFKM, PGAM1, PGAM4, PPIL1, PRDX4, PRSS23, PSMD1, PSMD11, PSMD14, PTRH2, PUS7, RBBP8, RPF2, RPP25, SFXN1, SLC27A2, SLC39A14, SLC43A3, SORD, SPR, SRXN1, STIP1, STT3A, TBX21, TMCC2, TMEM165, TNFRSF9, TXN, TXNDC5, UCK2, VDR, WDR12, YWHAG, and ZDHHC16. In some embodiments, a T_{RE}G cell is a cell with upregulated expression of one or more (e.g., at least 10, 20, 30, 40, 50, 60, 70, or all) of the following genes: AIM2, ALAS1, BATF, C5orf32, CCL17, CD40LG, CHAC2, CSF1, CTSL1, EBNA1BP2, EDARADD, EMP1, EPAS1, FABP5, FAM40B, FKBP4, FOSL1, GCLM, GK, GPR56, HMOX1, HSPD1, HSPE1, IKBIP, IL10, IL13, IL15RA, IL1RN, IL2RA, IL3, IL4, IL5, IL9, KCNK5, LTA, MANF, MIR1182, MIR155, MIR155HG, MYOF, NDUFAF1, NLN, NME1, NME1-NME2, PANX2, PDIA6, PGAM4, PPIL1, PPPDE2, PRDX4, PRKAR1B, PSMD1, PSMD11, PUS7, RBBP8, SLC27A2, SLC39A14, SLC43A3, SRXN1, STIP1, STT3A, TBX21, TNFRSF11A, TNFRSFlB, TNFRSF8, TNFRSF9, TXN, UCK2, VDR, VTRNAl-3, WDR12, YWHAG, ZDHHC16, and ZNF282. The upregulated expression may be, e.g., measured 16 hours after stimulation. The upregulated expression may be determined, e.g., by measuring RNA levels for the indicated genes.

[1211] In embodiments, the method comprises decreasing the T_{REG} signature in the subject prior to apheresis. In embodiments, the method further comprises decreasing the T_{REG} signature in the subject, e.g., by administering cyclophosphamide, an anti-GITR antibody, or both to the subject. In embodiments, the method comprises pre-treating a subject with cyclophosphamide, an anti-GITR antibody, or both, prior to collection of cells for CAR-expressing cell product manufacturing. In embodiments, the method further comprises obtaining a sample from the subject, wherein the sample comprises a cellular fraction (e.g., which comprises blood), a tissue fraction, an apheresis sample, or a bone marrow sample.

### Pharmaceutical Compositions and Treatments

[1212] Pharmaceutical compositions of the present invention may comprise, in some aspects, a CAR-expressing cell, e.g., a plurality of CAR-expressing cells, as described herein, in combination with one or more pharmaceutically or physiologically acceptable carriers, diluents or excipients. Such compositions may comprise buffers such as neutral buffered saline, phosphate buffered saline and the like; carbohydrates such as glucose, mannose, sucrose or dextrans, mannitol; proteins; polypeptides or amino acids such as glycine; antioxidants; chelating agents such as EDTA or glutathione; adjuvants (e.g., aluminum hydroxide); and preservatives. Compositions of the present invention are in one aspect formulated for intravenous administration.

[1213] Pharmaceutical compositions of the present invention may be administered in a manner appropriate to the disease to be treated (or prevented). The quantity and frequency of administration will be determined by such factors as the condition of the patient, and the type and severity of the patient's disease, although appropriate dosages may be determined by clinical trials.

[1214] In one embodiment, the pharmaceutical composition is substantially free of, e.g., there are no detectable levels of a contaminant, e.g., selected from the group consisting of endotoxin, mycoplasma, replication competent lentivirus (RCL), p24, VSV-G nucleic acid, HIV gag, residual anti-CD3/anti-CD28 coated beads, mouse antibodies, pooled human serum, bovine serum albumin, bovine serum, culture media components, vector packaging cell or plasmid components, a bacterium and a fungus. In one embodiment, the bacterium is at least one selected from the group consisting of Alcaligenes faecalis, Candida albicans, Escherichia coli, Haemophilus influenza, Neisseria meningitides, Pseudomonas aeruginosa, Staphylococcus aureus, Streptococcus pneumonia, and Streptococcus pyogenes group A.

[1215] When “an immunologically effective amount,” “an anti-tumor effective amount,” “a tumor-inhibiting effective amount,” or “therapeutic amount” is indicated, the precise amount of the compositions of the present invention to be administered can be determined by a physician with consideration of individual differences in age, weight, tumor size, extent of infection or metastasis, and condition of the patient (subject). In some embodiments, a pharmaceutical composition comprising the cells, e.g., T cells described herein may be administered at a dosage of 10⁴ to 10⁹ cells/kg body weight, in some instances 10⁵ to 10⁶ cells/kg body weight, including all integer values within those ranges. In some embodiments, the cells, e.g., T cells described herein may be administered at 3×10⁴, 1×10⁶, 3×10⁶, or 1×10⁷ cells/kg body weight. The cell compositions may also be administered multiple times at these dosages. The cells can be administered by using infusion techniques that are commonly known in immunotherapy (see, e.g., Rosenberg et al., New Eng. J. of Med. 319:1676, 1988).

[1216] In some embodiments, a dose of CAR cells (e.g., CD19 or BCMA CAR cells) comprises about 1×10⁵, 2×10⁵, 5×10⁵, 1×10⁶, 1.1×10⁶, 2×10⁶, 3.6×10⁶, 5×10⁶, 1×10⁷, 1.8×10⁷, 2×10⁷, 5×10⁷, 1×10⁸, 2×10⁸, or 5×10⁸ cells/kg. In some embodiments, a dose of CAR cells (e.g., CD19 or BCMA CAR cells) comprises at least about 1×10⁵, 2×10⁵, 5×10⁵, 1×10⁶, 11×10⁶, 2×10⁶, 3.6×10⁶, 5×10⁶, 1×10⁷, 1.8×10⁷, 2×10⁷, 5×10⁷, 1×10⁸, 2×10⁸, or 5×10⁸ cells/kg. In some embodiments, a dose of CAR cells (e.g., CD19 or BCMA CAR cells) comprises up to about 1×10⁵, 2×10⁵, 5×10⁵, 1×10⁶, 1.1×10⁶, 2×10⁶, 3.6×10⁶, 5×10⁶, 1×10⁷, 1.8×10⁷, 2×10⁷, 5×10⁷, 1×10⁸, 2×10⁸, or 5×10⁸ cells/kg. In some embodiments, a dose of CAR cells (e.g., CD19 or BCMA CAR cells) comprises about 1.1×10⁶-1.8×10⁷ cells/kg or about 8×10⁵-1.5×10⁶ cells/kg. In some embodiments, a dose of CAR cells (e.g., CD19 or BCMA CAR cells) comprises about 1×10⁷, 2×10⁷, 5×10⁷, 1×10⁸, 2×10⁸, 5×10⁸, 1×10⁹, 2×10⁹, or 5×10⁹ cells. In some embodiments, a dose of CAR cells (e.g., CD19 or BCMA CAR cells) comprises at least about 1×10⁷, 2×10⁷, 5×10⁷, 1×10⁸, 2×10⁸, 5×10⁸, 1×10⁹, 2×10⁹, or 5×10⁹ cells. In some embodiments, a dose of CAR cells (e.g., CD19 or BCMA CAR cells) comprises up to about 1×10⁷, 2×10⁷, 5×10⁷, 1×10⁸, 2×10⁸, 5×10⁸, 1×10⁹, 2×10⁹, or 5×10⁹ cells.

[1217] In certain aspects, it may be desired to administer activated cells, e.g., T cells or NK cells, to a subject and then subsequently redraw blood (or have an apheresis performed), activate the cells therefrom according to the present invention, and reinfuse the patient with these activated and expanded cells. This process can be carried out multiple times every few weeks. In certain aspects, cells, e.g., T cells or NK cells, can be activated from blood draws of from 10 cc to 400 cc. In certain aspects, cells, e.g., T cells or NK cells, are activated from blood draws of 20 cc, 30 cc, 40 cc, 50 cc, 60 cc, 70 cc, 80 cc, 90 cc, or 100 cc.

[1218] The administration of the subject compositions may be carried out in any convenient manner, including by aerosol inhalation, injection, ingestion, transfusion, implantation or transplantation. The compositions described herein may be administered to a patient trans arterially, subcutaneously, intradermally, intratumorally, intranodally, intramedullary, intramuscularly, by intravenous (i.v.) injection, or intraperitoneally. In one aspect, the cell compositions, e.g., T cell or NK cell compositions, of the present invention are administered to a patient by intradermal or subcutaneous injection. In one aspect, the cell compositions e.g., T cell or NK cell compositions, of the present invention are administered by i.v. injection. The compositions of cells e.g., T cell or NK cell compositions, may be injected directly into a tumor, lymph node, or site of infection.

[1219] In a particular exemplary aspect, subjects may undergo leukapheresis, wherein leukocytes are collected, enriched, or depleted ex vivo to select and/or isolate the cells of interest, e.g., T cells. These cell isolates, e.g., T cell or NK cell isolates, may be expanded by methods known in the art and treated such that one or more CAR constructs of the invention may be introduced, thereby creating a CAR-expressing cell, e.g., CAR T cell of the invention. Subjects in need thereof may subsequently undergo standard treatment with high dose chemotherapy followed by peripheral blood stem cell transplantation. In certain aspects, following or concurrent with the transplant, subjects receive an infusion of the expanded CAR-expressing cells of the present invention. In an additional aspect, expanded cells are administered before or following surgery.

[1220] The dosage of the above treatments to be administered to a patient will vary with the precise nature of the condition being treated and the recipient of the treatment. The scaling of dosages for human administration can be performed according to art-accepted practices. The dose for a therapeutic, e.g., an antibody, e.g., CAMPATH, for example, may be, e.g., in the range 1 to about 100 mg for an adult patient, e.g., administered daily for a period between 1 and 30 days. A suitable daily dose is 1 to 10 mg per day although in some instances larger doses of up to 40 mg per day may be used (described in U.S. Pat. No. 6,120,766).

[1221] In one embodiment, the CAR is introduced into cells, e.g., T cells or NK cells, e.g., using in vitro transcription, and the subject (e.g., human) receives an initial administration of CAR-expressing cells, e.g., CAR T cells of the invention, and one or more subsequent administrations of the CAR-expressing cells, e.g., CAR T cells of the invention, wherein the one or more subsequent administrations are administered less than 15 days, e.g., 14, 13, 12, 11, 10, 9, 8, 7, 6, 5, 4, 3, or 2 days after the previous administration. In one embodiment, more than one administration of the CAR-expressing cells, e.g., CAR T cells of the invention are administered to the subject (e.g., human) per week, e.g., 2, 3, or 4 administrations of the CAR-expressing cells, e.g., CAR T cells of the invention are administered per week. In one embodiment, the subject (e.g., human subject) receives more than one administration of the CAR-expressing cells, e.g., CAR T cells per week (e.g., 2, 3 or 4 administrations per week) (also referred to herein as a cycle), followed by a week of no CAR-expressing cells, e.g., CAR T cells administrations, and then one or more additional administration of the CAR-expressing cells, e.g., CAR T cells (e.g., more than one administration of the CAR-expressing cells, e.g., CAR T cells per week) is administered to the subject. In another embodiment, the subject (e.g., human subject) receives more than one cycle of CAR-expressing cells, e.g., CAR T cells, and the time between each cycle is less than 10, 9, 8, 7, 6, 5, 4, or 3 days. In one embodiment, the CAR-expressing cells, e.g., CAR T cells are administered every other day for 3 administrations per week. In one embodiment, the CAR-expressing cells, e.g., CAR T cells of the invention are administered for at least two, three, four, five, six, seven, eight or more weeks.

[1222] In some embodiments, subjects may be adult subjects (i.e., 18 years of age and older). In certain embodiments, subjects may be between 1 and 30 years of age. In some embodiments, the subjects are 16 years of age or older. In certain embodiments, the subjects are between 16 and 30 years of age. In some embodiments, the subjects are child subjects (i.e., between 1 and 18 years of age).

[1223] In one aspect, CAR-expressing cells, e.g., CARTs are generated using lentiviral viral vectors, such as lentivirus. CAR-expressing cells, e.g., CARTs generated that way will have stable CAR expression.

[1224] In one aspect, CAR-expressing cells, e.g., CARTs, are generated using a viral vector such as a gammaretroviral vector, e.g., a gammaretroviral vector described herein. CARTs generated using these vectors can have stable CAR expression.

[1225] In one aspect, CAR-expressing cells, e.g., CARTs transiently express CAR vectors for 4, 5, 6, 7, 8, 9, 10, 11, 12, 13, 14, 15 days after transduction. Transient expression of CARs can be effected by RNA CAR vector delivery. In one aspect, the CAR RNA is transduced into the cell, e.g., NK cell or T cell, by electroporation.

[1226] A potential issue that can arise in patients being treated using transiently expressing CAR T cells (particularly with murine scFv bearing CARTs) is anaphylaxis after multiple treatments.

[1227] Without being bound by this theory, it is believed that such an anaphylactic response might be caused by a patient developing humoral anti-CAR response, i.e., anti-CAR antibodies having an anti-IgE isotype. It is thought that a patient's antibody producing cells undergo a class switch from IgG isotype (that does not cause anaphylaxis) to IgE isotype when there is a ten to fourteen day break in exposure to antigen.

[1228] If a patient is at high risk of generating an anti-CAR antibody response during the course of transient CAR therapy (such as those generated by RNA transductions), CART infusion breaks should not last more than ten to fourteen days.

### CAR22

[1229] Design, function and sequences of CAR22 constructs, and exemplary CAR22 constructs, are described, e.g., in pages 363-422 of International Application WO 2016/164731, filed Apr. 8, 2016, which is incorporated by reference in its entirety.

[1230] The sequences of the human CARs are provided in Table 6A and 6B on pages 364-404 of International Application WO 2016/164731, filed Apr. 8, 2016, which is incorporated by reference in its entirety. The clones, which are incorporated by reference herein, all contained a Q/K residue change in the signal domain of the co-stimulatory domain derived from CD3zeta chain. Several CD22 scFv sequences were generated and are described in Table 6B on pages 403-404 of International Application WO 2016/164731.

[1231] In some embodiments, the antigen binding domain of a CD22 CAR construct comprises a HC CDR1, a HC CDR2, and a HC CDR3 of any heavy chain binding domain amino acid sequences listed in Table 6A or 6B on pages 364-404 of International Application WO 2016/164731, filed Apr. 8, 2016, which is incorporated by reference in its entirety and further comprises a LC CDR1, a LC CDR2, and a LC CDR3 of any light chain binding domain amino acid sequences listed in Table 6A or 6B on pages 364-404 of International Application WO 2016/164731.

[1232] In some embodiments, the antigen binding domain of a CD22 CAR construct comprises one, two or all of LC CDR1, LC CDR2, and LC CDR3 of any light chain binding domain amino acid sequences listed in Table 6A or 6B on pages 364-404 of International Application WO 2016/164731, and one, two or all of HC CDR1, HC CDR2, and HC CDR3 of any heavy chain binding domain amino acid sequences listed in Table 6A or 6B on pages 364-404 of International Application WO 2016/164731.

[1233] The sequences of human CDR sequences of the scFv domains of a CD22 CAR construct are shown in Table 7A, 7B, or 7C on pages 406-411 of International Application WO 2016/164731 for the heavy chain variable domains and in Table 8A or 8B for the light chain variable domains on pages 412-414 of International Application WO 2016/164731.

[1234] In some embodiments, the antigen binding domain of a CD22 CAR construct comprises a HC CDR1, a HC CDR2, and a HC CDR3 of any heavy chain binding domain amino acid sequences listed in Table 9A or 9B on pages 414-418 of International Application WO 2016/164731. In embodiments, the antigen binding domain further comprises a LC CDR1, a LC CDR2, and a LC CDR3. In embodiments, the antigen binding domain comprises a LC CDR1, a LC CDR2, and a LC CDR3 of any light chain binding domain amino acid sequences listed in Table 10A or 10B on pages 418-421 of International Application WO 2016/164731.

[1235] In some embodiments, the antigen binding domain of a CD22 CAR construct comprises one, two or all of LC CDR1, LC CDR2, and LC CDR3 of any light chain binding domain amino acid sequences listed in Table 10A or 10B on pages 418-421 of International Application WO 2016/164731, and one, two or all of HC CDR1, HC CDR2, and HC CDR3 of any heavy chain binding domain amino acid sequences listed in Table 9A or 9B on pages 414-418 of International Application WO 2016/164731.

[1236] The order of the VL and VH domains in the scFv, the presence of a linker, and mutations in the CD3 zeta chain are described, e.g., on lines 8-15 on page 422 of International Application WO 2016/164731, filed Apr. 8, 2016, which is incorporated by reference in its entirety

### CAR20 Constructs

[1237] Design, function and sequences of CAR20 constructs, and exemplary CAR20 constructs, are described, e.g., in pages 422-454 of International Application WO 2016/164731, filed Apr. 8, 2016, which is incorporated by reference in its entirety.

[1238] Isolated anti-CD20 single chain variable fragments and sequences of exemplary CD20 CARs are described in Table 11A and 11B on pages 422-446 of International Application WO 2016/164731.

[1239] In some embodiments, the antigen binding domain of a CD20 CAR construct comprises a HC CDR1, a HC CDR2, and a HC CDR3 of any heavy chain binding domain amino acid sequences listed in Table 11A and 11B on pages 422-446 of International Application WO 2016/164731. In embodiments, the antigen binding domain further comprises a LC CDR1, a LC CDR2, and a LC CDR3. In embodiments, the antigen binding domain of a CD20 CAR construct comprises a LC CDR1, a LC CDR2, and a LC CDR3 of any light chain binding domain amino acid sequences listed in Table 11A and 11B on pages 422-446 of International Application WO 2016/164731.

[1240] In some embodiments, the antigen binding domain of a CD20 CAR construct comprises one, two or all of LC CDR1, LC CDR2, and LC CDR3 of any light chain binding domain amino acid sequences listed in Table 11A and 11B on pages 422-446 of International Application WO 2016/164731, and one, two or all of HC CDR1, HC CDR2, and HC CDR3 of any heavy chain binding domain amino acid sequences listed in Table 11A and 11B on pages 422-446 of International Application WO 2016/164731.

[1241] The sequences of human CDR sequences of the scFv domains of a CD20 CAR construct are shown in Table 12A, Table 12B or Table 13 on pages 447-449 of International Application WO 2016/164731.

[1242] In some embodiments, the antigen binding domain of a CD20 CAR construct comprises a HC CDR1, a HC CDR2, and a HC CDR3 of any heavy chain binding domain amino acid sequences listed in Table 14A or 14B on pages 450-452 of International Application WO 2016/164731, and further comprises a LC CDR1, a LC CDR2, and a LC CDR3 of any light chain binding domain amino acid sequences listed in Table 15A or 15B on pages 452-454 of International Application WO 2016/164731.

[1243] In some embodiments, the antigen binding domain comprises one, two or all of LC CDR1, LC CDR2, and LC CDR3 of any light chain binding domain amino acid sequences listed in Table 15A or 15B on pages 452-454 of International Application WO 2016/164731, and one, two or all of HC CDR1, HC CDR2, and HC CDR3 of any heavy chain binding domain amino acid sequences listed in Table 14A or 14B on pages 450-452 of International Application WO 2016/164731.

### CAR123 Constructs

[1244] Design, function and sequences of CAR123 constructs, and exemplary CAR123 constructs, are described, e.g., in pages 454-501 of International Application WO 2016/164731, filed Apr. 8, 2016, which is incorporated by reference in its entirety.

[1245] The sequences of exemplary human CD123 CARs are provided in Table 16 on pages 455-459 of International Application WO 2016/164731.

[1246] The order of the VL and VH domains in the scFv, the presence of a linker, and mutations in the CD3 zeta chain are described, e.g., on lines 27-29 on page 454, and lines 5-9 on page 455 of International Application WO 2016/164731, filed Apr. 8, 2016, which is incorporated by reference in its entirety.

[1247] In some embodiments, the antigen binding domain of a CD123 CAR construct comprises a HC CDR1, a HC CDR2, and a HC CDR3 of any heavy chain binding domain amino acid sequences listed in Table 16 on pages 455-459 of International Application WO 2016/164731, and further comprises a LC CDR1, a LC CDR2, and a LC CDR3 of any light chain binding domain amino acid sequences listed in Table 16 on pages 455-459 of International Application WO 2016/164731.

[1248] In some embodiments, the antigen binding domain of a CD123 CAR construct comprises one, two or all of LC CDR1, LC CDR2, and LC CDR3 of any light chain binding domain amino acid sequences listed in Table 16 on pages 455-459 of International Application WO 2016/164731, and one, two or all of HC CDR1, HC CDR2, and HC CDR3 of any heavy chain binding domain amino acid sequences listed in Table 16 on pages 455-459 of International Application WO 2016/164731.

[1249] The sequences of human CDR sequences of the scFv domains of a CD123 CAR construct are shown in Table 17 and Table 18 on page 460 of International Application WO 2016/164731.

[1250] In an embodiment, the B-cell inhibitor comprises a CD123 CAR which comprises an antibody or antibody fragment which includes a CD123 binding domain, wherein said CD123 binding domain comprises one or more of light chain complementary determining region 1 (LC CDR1), light chain complementary determining region 2 (LC CDR2), and light chain complementary determining region 3 (LC CDR3) amino acid sequence listed in Table 18, Table 20, Table 22, or Table 24 of International Application WO 2016/164731, and one or more of heavy chain complementary determining region 1 (HC CDR1), heavy chain complementary determining region 2 (HC CDR2), and heavy chain complementary determining region 3 (HC CDR3) of any CD123 heavy chain binding domain amino acid sequence listed in Table 17, Table 19, Table 21, or Table 23 of International Application WO 2016/164731.

[1251] Additional CD123 CDR sequences of the scFv domains are described in Tables 19-24 on pages 461-463 of International Application WO 2016/164731.

[1252] Additional description of these CD123 CARs is provided, for instance, in PCT/CN2014/090508, which is incorporated by reference herein in its entirety.

[1253] Generation of CART-CD123, evaluation of cytolytic activity of CART-CD123, T cell transduction, degranulation, cytotoxicity and in vivo efficacy are described, e.g., in FIGS. 42-48 on pages 647-656 of International Application WO 2016/164731, filed Apr. 8, 2016, which is incorporated by reference in its entirety.

[1254] Humanized anti-CD123 single chain variable fragments (scFv) are described, e.g., on lines 8-11 on page 467 of International Application WO 2016/164731, and the sequence of the humanized CARs are provided in Table 25 on page 467-500 of International Application WO 2016/164731. The sequences of humanized CDR sequences of the scFv domains of hzCD123 CAR 1-32 are shown in Table 26 and Table 27 on pages 500-501 of International Application WO 2016/164731. In some embodiments, the CAR123 has a HCDR3 having the sequence YCARGNWDDY, as described e.g., on lines 8-9 on page 501 of International Application WO 2016/164731.

[1255] The order of the VL and VH domains in the scFv, the presence of a linker, and mutations in the CD3 zeta chain are described, e.g., on lines 12-19 on page 467 of International Application WO 2016/164731, filed Apr. 8, 2016, which is incorporated by reference in its entirety.

### Bispecific CAR19/CAR22 Constructs and Function Thereof

[1256] The production and function of bispecific CAR19/CAR22 constructs is described, e.g., on pages 501-506 of International Application WO 2016/164731, filed Apr. 8, 2016, which is incorporated by reference in its entirety. The anti-CD19 base molecule is a humanized anti-CD19 sequence, provided as construct ID 104876 of Table 2, which uses the LH orientation.

[1257] The nucleotide and amino acid sequences of CAR19/CAR22 constructs, are provided in Table 28 on pages 501-508 of International Application WO 2016/164731.

[1258] In some embodiments, the antigen binding domain comprises a HC CDR1, a HC CDR2, and a HC CDR3 of any heavy chain binding domain amino acid sequences listed in Table 28 on pages 501-508 of International Application WO 2016/164731, and further comprises a LC CDR1, a LC CDR2, and a LC CDR3 of any light chain binding domain amino acid sequences listed in Table 28 on pages 501-508 of International Application WO 2016/164731.

[1259] In some embodiments, the antigen binding domain comprises one, two or all of LC CDR1, LC CDR2, and LC CDR3 of any light chain binding domain amino acid sequences listed in Table 28 on pages 501-508 of International Application WO 2016/164731, and one, two or all of HC CDR1, HC CDR2, and HC CDR3 of any heavy chain binding domain amino acid sequences listed in Table 28 on pages 501-508 of International Application WO 2016/164731.

[1260] Activity of CD19 and CD22 scFvs against their targets is described, e.g., on lines 6-9 on page 506 of International Application WO 2016/164731.

### Additional CARs and Binding Domains

[1261] In other embodiments, the CAR-expressing cells can specifically bind to CD123, e.g., can include a CAR molecule (e.g., any of the CAR1-CAR8), or an antigen binding domain according to Tables 1-2 of WO 2014/130635, incorporated herein by reference. In an embodiment, the CAR molecule comprises a CD123 CAR described herein, e.g., a

[1262] CD123 CAR described in US2014/0322212A1 or US2016/0068601A1, both incorporated herein by reference. In embodiments, the CD123 CAR comprises an amino acid, or has a nucleotide sequence shown in US2014/0322212A1 or US2016/0068601A1, both incorporated herein by reference.

[1263] In other embodiments, the CAR-expressing cells can specifically bind to EGFRvIII, e.g., can include a CAR molecule, or an antigen binding domain according to Table 2 or SEQ ID NO:11 of WO 2014/130657, incorporated herein by reference.

[1264] In an embodiment, the CAR molecule comprises an EGFRvIII CAR molecule described herein, e.g., an EGFRvIII CAR described US2014/0322275A1, incorporated herein by reference. In embodiments, the EGFRvIII CAR comprises an amino acid, or has a nucleotide sequence shown in US2014/0322275A1, incorporated herein by reference.

[1265] In other embodiments, the CAR-expressing cells can specifically bind to mesothelin, e.g., can include a CAR molecule, or an antigen binding domain according to Tables 2-3 of WO 2015/090230, incorporated herein by reference.

[1266] In an embodiment, the CAR molecule comprises a mesothelin CAR described herein, e.g., a mesothelin CAR described in WO 2015/090230, incorporated herein by reference. In embodiments, the mesothelin CAR comprises an amino acid, or has a nucleotide sequence shown in WO 2015/090230, incorporated herein by reference.

[1267] In one embodiment, CAR molecule comprises a BCMA CAR molecule described herein, e.g., a BCMA CAR described in US-2016-0046724-A1. In embodiments, the BCMA CAR comprises an amino acid, or has a nucleotide sequence shown in US-2016-0046724-A1, incorporated herein by reference.

[1268] In an embodiment, the CAR molecule comprises a CLL1 CAR described herein, e.g., a CLL1 CAR described in US2016/0051651A1, incorporated herein by reference. In embodiments, the CLL1 CAR comprises an amino acid, or has a nucleotide sequence shown in US2016/0051651A1, incorporated herein by reference.

[1269] In an embodiment, the CAR molecule comprises a CD33 CAR described herein, e.ga CD33 CAR described in US2016/0096892A1, incorporated herein by reference. In embodiments, the CD33 CAR comprises an amino acid, or has a nucleotide sequence shown in US2016/0096892A1, incorporated herein by reference.

[1270] In accordance with any method or composition described herein, in embodiments, a CAR molecule comprises a CD123 CAR described herein, e.g., a CD123 CAR described in US2014/0322212A1 or US2016/0068601A1, both incorporated herein by reference. In embodiments, the CD123 CAR comprises an amino acid, or has a nucleotide sequence shown in US2014/0322212A1 or US2016/0068601A1, both incorporated herein by reference. In other embodiments, a CAR molecule comprises a CD19 CAR molecule described herein, e.g., a CD19 CAR molecule described in US-2015-0283178-A1, e.g., CTL019. In embodiments, the CD19 CAR comprises an amino acid, or has a nucleotide sequence shown in US-2015-0283178-A1, incorporated herein by reference. In one embodiment, CAR molecule comprises a BCMA CAR molecule described herein, e.g., a BCMA CAR described in US-2016-0046724-A1. In embodiments, the BCMA CAR comprises an amino acid, or has a nucleotide sequence shown in US-2016-0046724-A1, incorporated herein by reference. In an embodiment, the CAR molecule comprises a CLL1 CAR described herein, e.g., a CLL1 CAR described in US2016/0051651A1, incorporated herein by reference. In embodiments, the CLL1 CAR comprises an amino acid, or has a nucleotide sequence shown in US2016/0051651A1, incorporated herein by reference. In an embodiment, the CAR molecule comprises a CD33 CAR described herein, e.g., a CD33 CAR described in US2016/0096892A1, incorporated herein by reference. In embodiments, the CD33 CAR comprises an amino acid, or has a nucleotide sequence shown in US2016/0096892A1, incorporated herein by reference. In an embodiment, the CAR molecule comprises an EGFRvIII CAR molecule described herein, e.g., an EGFRvIII CAR described US2014/0322275A1, incorporated herein by reference. In embodiments, the EGFRvIII CAR comprises an amino acid, or has a nucleotide sequence shown in US2014/0322275A1, incorporated herein by reference. In an embodiment, the CAR molecule comprises a mesothelin CAR described herein, e.g., a mesothelin CAR described in WO 2015/090230, incorporated herein by reference. In embodiments, the mesothelin CAR comprises an amino acid, or has a nucleotide sequence shown in WO 2015/090230, incorporated herein by reference.

[1271] Exemplary CD19 CARs include CD19 CARs described herein, e.g., in one or more tables described herein, or an anti-CD19 CAR described in Xu et al. Blood 123.24(2014):3750-9; Kochenderfer et al. Blood 122.25(2013):4129-39, Cruz et al. Blood 122.17(2013):2965-73, NCT00586391, NCT01087294, NCT02456350, NCT00840853, NCT02659943, NCT02650999, NCT02640209, NCT01747486, NCT02546739, NCT02656147, NCT02772198, NCT00709033, NCT02081937, NCT00924326, NCT02735083, NCT02794246, NCT02746952, NCT01593696, NCT02134262, NCT01853631, NCT02443831, NCT02277522, NCT02348216, NCT02614066, NCT02030834, NCT02624258, NCT02625480, NCT02030847, NCT02644655, NCT02349698, NCT02813837, NCT02050347, NCT01683279, NCT02529813, NCT02537977, NCT02799550, NCT02672501, NCT02819583, NCT02028455, NCT01840566, NCT01318317, NCT01864889, NCT02706405, NCT01475058, NCT01430390, NCT02146924, NCT02051257, NCT02431988, NCT01815749, NCT02153580, NCT01865617, NCT02208362, NCT02685670, NCT02535364, NCT02631044, NCT02728882, NCT02735291, NCT01860937, NCT02822326, NCT02737085, NCT02465983, NCT02132624, NCT02782351, NCT01493453, NCT02652910, NCT02247609, NCT01029366, NCT01626495, NCT02721407, NCT01044069, NCT00422383, NCT01680991, NCT02794961, or NCT02456207, each of which is incorporated herein by reference in its entirety.

[1272] In one embodiment, the antigen binding domain comprises one, two three (e.g., all three) heavy chain CDRs, HC CDR1, HC CDR2 and HC CDR3, from an antibody described herein (e.g., an antibody described in WO2015/142675, US-2015-0283178-A1, US-2016-0046724-A1, US2014/0322212A1, US2016/0068601A1, US2016/0051651A1, US2016/0096892A1, US2014/0322275A1, or WO2015/090230, incorporated herein by reference), and/or one, two, three (e.g., all three) light chain CDRs, LC CDR1, LC CDR2 and LC CDR3, from an antibody described herein (e.g., an antibody described in WO2015/142675, US-2015-0283178-A1, US-2016-0046724-A1, US2014/0322212A1, US2016/0068601A1, US2016/0051651A1, US2016/0096892A1, US2014/0322275A1, or WO2015/090230, incorporated herein by reference). In one embodiment, the antigen binding domain comprises a heavy chain variable region and/or a variable light chain region of an antibody listed above.

[1273] In embodiments, the antigen binding domain is an antigen binding domain described in WO2015/142675, US-2015-0283178-A1, US-2016-0046724-A1, US2014/0322212A1, US2016/0068601A1, US2016/0051651A1, US2016/0096892A1, US2014/0322275A1, or WO2015/090230, incorporated herein by reference.

[1274] In embodiments, the antigen binding domain targets BCMA and is described in US-2016-0046724-A1.

[1275] In embodiments, the antigen binding domain targets CD19 and is described in US-2015-0283178-A1.

[1276] In embodiments, the antigen binding domain targets CD123 and is described in US2014/0322212A1, US2016/0068601A1.

[1277] In embodiments, the antigen binding domain targets CLL and is described in US2016/0051651A1.

[1278] In embodiments, the antigen binding domain targets CD33 and is described in US2016/0096892A1.

[1279] Exemplary target antigens that can be targeted using the CAR-expressing cells, include, but are not limited to, CD19, CD123, EGFRvIII, CD33, mesothelin, BCMA, and GFR ALPHA-4, among others, as described in, for example, WO2014/153270, WO 2014/130635, WO2016/028896, WO 2014/130657, WO2016/014576, WO 2015/090230, WO2016/014565, WO2016/014535, and WO2016/025880, each of which is herein incorporated by reference in its entirety.

[1280] In other embodiments, the CAR-expressing cells can specifically bind to humanized CD19, e.g., can include a CAR molecule, or an antigen binding domain (e.g., a humanized antigen binding domain) according to Table 3 of WO2014/153270, incorporated herein by reference. The amino acid and nucleotide sequences encoding the CD19 CAR molecules and antigen binding domains (e.g., including one, two, three VH CDRs; and one, two, three VL CDRs according to Kabat or Chothia), are specified in WO2014/153270.

[1281] In other embodiments, the CAR-expressing cells can specifically bind to CD123, e.g., can include a CAR molecule (e.g., any of the CAR1 to CAR8), or an antigen binding domain according to Tables 1-2 of WO 2014/130635, incorporated herein by reference. The amino acid and nucleotide sequences encoding the CD123 CAR molecules and antigen binding domains (e.g., including one, two, three VH CDRs; and one, two, three VL CDRs according to Kabat or Chothia), are specified in WO 2014/130635.

[1282] In other embodiments, the CAR-expressing cells can specifically bind to CD123, e.g., can include a CAR molecule (e.g., any of the CAR123-1 ro CAR123-4 and hzCAR123-1 to hzCAR123-32), or an antigen binding domain according to Tables 2, 6, and 9 of WO2016/028896, incorporated herein by reference. The amino acid and nucleotide sequences encoding the CD123 CAR molecules and antigen binding domains (e.g., including one, two, three VH CDRs; and one, two, three VL CDRs according to Kabat or Chothia), are specified in WO2016/028896.

[1283] In other embodiments, the CAR-expressing cells can specifically bind to EGFRvIII, e.g., can include a CAR molecule, or an antigen binding domain according to Table 2 or SEQ ID NO:11 of WO 2014/130657, incorporated herein by reference. The amino acid and nucleotide sequences encoding the EGFRvIII CAR molecules and antigen binding domains (e.g., including one, two, three VH CDRs; and one, two, three VL CDRs according to Kabat or Chothia), are specified in WO 2014/130657.

[1284] In other embodiments, the CAR-expressing cells can specifically bind to CD33, e.g., can include a CAR molecule (e.g., any of CAR33-1 to CAR-33-9), or an antigen binding domain according to Table 2 or 9 of WO2016/014576, incorporated herein by reference. The amino acid and nucleotide sequences encoding the CD33 CAR molecules and antigen binding domains (e.g., including one, two, three VH CDRs; and one, two, three VL CDRs according to Kabat or Chothia), are specified in WO2016/014576.

[1285] In other embodiments, the CAR-expressing cells can specifically bind to mesothelin, e.g., can include a CAR molecule, or an antigen binding domain according to Tables 2-3 of WO 2015/090230, incorporated herein by reference. The amino acid and nucleotide sequences encoding the mesothelin CAR molecules and antigen binding domains (e.g., including one, two, three VH CDRs; and one, two, three VL CDRs according to Kabat or Chothia), are specified in WO 2015/090230.

[1286] In other embodiments, the CAR-expressing cells can specifically bind to BCMA, e.g., can include a CAR molecule, or an antigen binding domain according to Table 1 or 16, SEQ ID NO: 271 or SEQ ID NO: 273 of WO2016/014565, incorporated herein by reference. The amino acid and nucleotide sequences encoding the BCMA CAR molecules and antigen binding domains (e.g., including one, two, three VH CDRs; and one, two, three VL CDRs according to Kabat or Chothia), are specified in WO2016/014565.

[1287] In other embodiments, the CAR-expressing cells can specifically bind to CLL-1, e.g., can include a CAR molecule, or an antigen binding domain according to Table 2 of WO2016/014535, incorporated herein by reference. The amino acid and nucleotide sequences encoding the CLL-1 CAR molecules and antigen binding domains (e.g., including one, two, three VH CDRs; and one, two, three VL CDRs according to Kabat or Chothia), are specified in WO2016/014535.

[1288] In other embodiments, the CAR-expressing cells can specifically bind to GFR ALPHA-4, e.g., can include a CAR molecule, or an antigen binding domain according to Table 2 of WO2016/025880, incorporated herein by reference. The amino acid and nucleotide sequences encoding the GFR ALPHA-4 CAR molecules and antigen binding domains (e.g., including one, two, three VH CDRs; and one, two, three VL CDRs according to Kabat or Chothia), are specified in WO2016/025880.

[1289] In one embodiment, the antigen binding domain of any of the CAR molecules described herein (e.g., any of CD19, CD123, EGFRvIII, CD33, mesothelin, BCMA, and GFR ALPHA-4) comprises one, two three (e.g., all three) heavy chain CDRs, HC CDR1, HC CDR2 and HC CDR3, from an antibody listed above, and/or one, two, three (e.g., all three) light chain CDRs, LC CDR1, LC CDR2 and LC CDR3, from an antigen binding domain listed above. In one embodiment, the antigen binding domain comprises a heavy chain variable region and/or a variable light chain region of an antibody listed or described above.

### CRS Therapies

[1290] Therapies for CRS include IL-6 inhibitor or IL-6 receptor (IL-6R) inhibitors (e.g., tocilizumab or siltuximab), bazedoxifene, sgp130 blockers, vasoactive medications, corticosteroids, immunosuppressive agents, and mechanical ventilation. Exemplary therapies for CRS are described in International Application WO2014011984, which is hereby incorporated by reference.

[1291] Tocilizumab is a humanized, immunoglobulin G1kappa anti-human IL-6R monoclonal antibody. See, e.g., id. Tocilizumab blocks binding of IL-6 to soluble and membrane bound IL-6 receptors (IL-6Rs) and thus inhibitos classical and trans-IL-6 signaling. In embodiments, tocilizumab is administered at a dose of about 4-12 mg/kg, e.g., about 4-8 mg/kg for adults and about 8-12 mg/kg for pediatric subjects, e.g., administered over the course of 1 hour.

[1292] In some embodiments, the CRS therapeutic is an inhibitor of IL-6 signalling, e.g., an inhibitor of IL-6 or IL-6 receptor. In one embodiment, the inhibitor is an anti-IL-6 antibody, e.g., an anti-IL-6 chimeric monoclonal antibody such as siltuximab. In other embodiments, the inhibitor comprises a soluble gp130 (sgp130) or a fragment thereof that is capable of blocking IL-6 signalling. In some embodiments, the sgp130 or fragment thereof is fused to a heterologous domain, e.g., an Fc domain, e.g., is a gp130-Fc fusion protein such as FE301. In embodiments, the inhibitor of IL-6 signalling comprises an antibody, e.g., an antibody to the IL-6 receptor, such as sarilumab, olokizumab (CDP6038), elsilimomab, sirukumab (CNTO 136), ALD518/BMS-945429, ARGX-109, or FM101. In some embodiments, the inhibitor of IL-6 signalling comprises a small molecule such as CPSI-2364.

[1293] Exemplary vasoactive medications include but are not limited to angiotensin-11, endothelin-1, alpha adrenergic agonists, rostanoids, phosphodiesterase inhibitors, endothelin antagonists, inotropes (e.g., adrenaline, dobutamine, isoprenaline, ephedrine), vasopressors (e.g., noradrenaline, vasopressin, metaraminol, vasopressin, methylene blue), inodilators (e.g., milrinone, levosimendan), and dopamine.

[1294] Exemplary vasopressors include but are not limited to norepinephrine, dopamine, phenylephrine, epinephrine, and vasopressin. In some embodiments, a high-dose vasopressor includes one or more of the following: norpepinephrine monotherapy at >20 ug/min, dopamine monotherapy at >10 ug/kg/min, phenylephrine monotherapy at >200 ug/min, and/or epinephrine monotherapy at >10 ug/min. In some embodiments, if the subject is on vasopressin, a high-dose vasopressor includes vasopressin+norepinephrine equivalent of >10 ug/min, where the norepinephrine equivalent dose=[norepinephrine (ug/min)]+[dopamine (ug/kg/min)/2]+[epinephrine (ug/min)]+[phenylephrine (ug/min)/10]. In some embodiments, if the subject is on combination vasopressors (not vasopressin), a high-dose vasopressor includes norepinephrine equivalent of ≥20 ug/min, where the norepinephrine equivalent dose=[norepinephrine (ug/min)]+[dopamine (ug/kg/min)/2]+[epinephrine (ug/min)]+[phenylephrine (ug/min)/10]. See e.g., Id.

[1295] In some embodiments, a low-dose vasopressor is a vasopressor administered at a dose less than one or more of the doses listed above for high-dose vasopressors.

[1296] Exemplary corticosteroids include but are not limited to dexamethasone, hydrocortisone, and methylprednisolone. In embodiments, a dose of dexamethasone of 0.5 mg/kg is used. In embodiments, a maximum dose of dexamethasone of 10 mg/dose is used. In embodiments, a dose of methylprednisolone of 2 mg/kg/day is used.

[1297] Exemplary immunosuppressive agents include but are not limited to an inhibitor of TNFα or an inhibitor of IL-1. In embodiments, an inhibitor of TNFα comprises an anti-TNFα antibody, e.g., monoclonal antibody, e.g., infliximab. In embodiments, an inhibitor of TNFα comprises a soluble TNFα receptor (e.g., etanercept). In embodiments, an IL-1 or IL-1R inhibitor comprises anakinra.

[1298] In some embodiments, the subject at risk of developing severe CRS is administered an anti-IFN-gamma or anti-sIL2Ra therapy, e.g., an antibody molecule directed against IFN-gamma or sIL2Ra.

[1299] In embodiments, a subject who has CRS or is at risk of developing CRS is treated with a fever reducing medication such as acetaminophen.

[1300] In embodiments, a subject herein is administered or provided one or more therapies for CRS described herein, e.g., one or more of IL-6 inhibitors or IL-6 receptor (IL-6R) inhibitors (e.g., tocilizumab), vasoactive medications, corticosteroids, immunosuppressive agents, or mechanical ventilation, in any combination, e.g., in combination with a CAR-expressing cell described herein.

[1301] In embodiments, a subject is administered one or more therapies for CRS described herein, e.g., one or more of IL-6 inhibitor or IL-6 receptor (IL-6R) inhibitors (e.g., tocilizumab), vasoactive medications, corticosteroids, immunosuppressive agents, or mechanical ventilation, in any combination, e.g., in combination with a CAR-expressing cell described herein.

[1302] In embodiments, a subject herein is transferred to an intensive care unit. In some embodiments, a subject herein is monitored for one ore more symptoms or conditions associated with CRS, such as fever, elevated heart rate, coagulopathy, MODS (multiple organ dysfunction syndrome), cardiovascular dysfunction, distributive shock, cardiomyopathy, hepatic dysfunction, renal dysfunction, encephalopathy, clinical seizures, respiratory failure, or tachycardia. In some embodiments, the methods herein comprise administering a therapy for one of the symptoms or conditions associated with CRS. For instance, in embodiments, e.g., if the subject develops coagulopathy, the method comprises administering cryoprecipitate. In some embodiments, e.g., if the subject develops cardiovascular dysfunction, the method comprises administering vasoactive infusion support. In some embodiments, e.g., if the subject develops distributive shock, the method comprises administering alpha-agonist therapy. In some embodiments, e.g., if the subject develops cardiomyopathy, the method comprises administering milrinone therapy. In some embodiments, e.g., if the subject develops respiratory failure, the method comprises performing mechanical ventilation (e.g., invasive mechanical ventilation or noninvasive mechanical ventilation). In some embodiments, e.g., if the subject develops shock, the method comprises administering crystalloid and/or colloid fluids.

[1303] In embodiments, the CAR-expressing cell is administered prior to, concurrently with, or subsequent to administration of one or more therapies for CRS described herein, e.g., one or more of IL-6 inhibitor or IL-6 receptor (IL-6R) inhibitors (e.g., tocilizumab), vasoactive medications, corticosteroids, immunosuppressive agents, or mechanical ventilation. In embodiments, the CAR-expressing cell is administered within 2 weeks (e.g., within 2 or 1 week, or within 14 days, e.g., within 14, 13, 12, 11, 10, 9, 8, 7, 6, 5, 4, 3, 2, 1 day or less) of administration of one or more therapies for CRS described herein, e.g., one or more of IL-6 inhibitors or IL-6 receptor (IL-6R) inhibitors (e.g., tocilizumab), vasoactive medications, corticosteroids, immunosuppressive agents, or mechanical ventilation. In embodiments, the CAR-expressing cell is administered at least 1 day (e.g., at least 1, 2, 3, 4, 5, 6, 7, 8, 9, 10, 11, 12, 13, 14, 15, 16, 17, 18, 19, 20, 1, week, 2 weeks, 3 weeks, 4 weeks, 1 month, 2 months, 3 months, 3 months, or more) before or after administration of one or more therapies for CRS described herein, e.g., one or more of IL-6 inhibitors or IL-6 receptor (IL-6R) inhibitors (e.g., tocilizumab), vasoactive medications, corticosteroids, immunosuppressive agents, or mechanical ventilation.

[1304] In embodiments, a subject herein is administered a single dose of an IL-6 inhibitor or IL-6 receptor (IL-6R) inhibitor (e.g., tocilizumab). In embodiments, the subject is administered a plurality of doses (e.g., 2, 3, 4, 5, 6, or more doses) of an IL-6 inhibitor or IL-6 receptor (IL-6R) inhibitor (e.g., tocilizumab).

[1305] In embodiments, CRS is graded according to Table 28B:

TABLE 28B
CRS grading

| | |
|---|---|
| Gr1 | Supportive care only |
| Gr2 | IV therapies +/− hospitalization. |
| Gr3 | Hypotension requiring IV fluids or low-dose |
| | vasoactives or hypoxemia requiring oxygen, |
| | CPAP, or BIPAP. |
| Gr4 | Hypotension requiring high-dose vasoactives |
| | or hypoxemia requiring mechanical ventilation. |
| Gr 5 | Death |

### EXAMPLES

[1306] The invention is further described in detail by reference to the following experimental examples. These examples are provided for purposes of illustration only, and are not intended to be limiting unless otherwise specified. Thus, the invention should in no way be construed as being limited to the following examples, but rather, should be construed to encompass any and all variations which become evident as a result of the teaching provided herein.

[1307] Without further description, it is believed that one of ordinary skill in the art can, using the preceding description and the following illustrative examples, make and utilize the compounds of the present invention and practice the claimed methods. The following working examples specifically point out various aspects of the present invention, and are not to be construed as limiting in any way the remainder of the disclosure.

### Example 1: Dosage Regimen for Chimeric Antigen Receptor (CAR) T Cell Therapy for Adult Patients with Relapsed or Refractory (r/r) Acute Lymphoblastic Leukemia (ALL)

[1308] Genetically modified T cells expressing an anti-CD19 CAR result in response rates of 90% in adults with r/r CD19+ ALL. Cytokine release syndrome (CRS) is the most significant treatment-related toxicity and usually responds to anti-cytokine therapy. This example reports outcomes from 30 adults with r/r ALL.

[1309] Inclusion criteria for the study included that the patients had CD19+ relapsed or refractory ALL (e.g., Primary Refractory, wherein patients failed≥2 lines of upfront treatment, or Relapsed ALL, wherein patients had a 1st or greater relapse); and >5% BM Blasts. Patient characteristics are described below in Table 34:

| Patient Characteristics | N = 30 | |
|---|---|---|
| Median Age (range) | 44 | (21, 72) |
| Post Allogenic Transplant | 10 | (33%) |
| Post Blinatumomab | 10 | (33%) |
| Ph+ | 3 | (10%) |
| Baseline ALL burden | | |
| >5% Blasts | 90% | |
| 0.01-5% Blasts | 3 | (10%) |

| | |
|---|---|
| <0.01% Blasts | 0 |

[1310] Autologous T cells were transduced with a lentiviral vector encoding a murine anti-CD19 scFv/4-1BB/CD3ζ (CTL019) CAR. Adults with r/r CD19+ ALL received CTL019 on one of 2 trials (NCT02030847; NCT01029366). All patients received lymphodepletion followed by CTL019 as a 1-time infusion or fractionated infusions over 3 days (10%:D1, 30%:D2 and 60%:D3). Total planned CTL019 dose varied (5×10⁷-5×10⁸) with protocol modifications for CRS toxicity. Bone marrow baseline assessment was performed on Day −1 before CTL019 treatment, with a response assessment at day 28, with follow-up assessments at 3, 6, 9, and 12 months.

[1311] 30 patients (median age 44 (range 21-72)); received CTL019 via 4 dosing cohorts (Table 35). 10 patients had prior blinatumomab and 10 had prior allogeneic SCT. 9 patients were treated with 5×10⁷ CTL019 cells with either a 1-time dose (n=3) or fractionated dosing (n=6). 6/9 patients had Grade 3-4 CRS managed with tocilizumab and 3 patients achieved a CR (33%). 6 patients were treated with a 1-time CTL019 dose of 5×10⁸. 3/6 patients died with CRS refractory to tocilizumab and corticosteroids. These 3 patients also had concurrent culture positive sepsis. The other 3 patients achieved CR. 15 patients were treated with a planned CTL019 dose of 5×10⁸ administered via fractionated dosing. If early CRS was noted, subsequent infusions of CTL019 were held allowing for intra-patient dose modification. Anti-cytokine treatment was initiated at Grade 3 CRS. A subset of the patients had manageable Grade 3-4 CRS with an ORR rate of 83%, including at least 9 complete responses.

TABLE 35

| | | | | | | |
|---|---|---|---|---|---|---|
| | CTL019 | | | CRS ≥ | CRS | Response |
| Cohort | Dose | Schedule | N | Gr3 | Gr5 | (Evaluable) |

Outcome (by Cohort)

| | | | | | | | |
|---|---|---|---|---|---|---|---|
| High Dose | 5 × 10⁸ | Split | 15 | 66% | 0 | 86% | (0 TRM) |
| Split | | | | | | | |
| High Dose | 5 × 10⁸ | Single | 6 | 100% | 3 | 100% | (3 TRM) |
| Single | | | | | | | |

| | | | | | | |
|---|---|---|---|---|---|---|
| Low Dose | 5 × 10⁷ | Single(3) | 9 | 66% | 0 | 33% |
| | | Split(6) | | | | |

Outcome (Total)

| | | | | | | | |
|---|---|---|---|---|---|---|---|
| Total (1-4) | 5 × 10⁷- | Single(9) | 30 | 75% | 3 | 72% | (3TRM) |
| | 5 × 10⁸ | Split(21) | | | | | |

[1312] Neurologic toxicity was also examined, and no clear dose to neuro-toxicity relationship was observed. All events (encephaly/delirium and seizure) were self-limited with return to baseline by Day 28.

[1313] Higher doses of CTL019 may be more effective and split dosing may improve safety allowing for intra-patient dose modification without compromising efficacy in adult patients with r/r ALL. There is a high risk of fatal outcome with concurrent sepsis and CRS, and measures to prevent infection and intervene early for CRS are warranted. This study also supports the use of inverse dosing based on disease burden. Furthermore, the study supports the use of cytokine therapy, e.g., as prophylactic or pre-emptive therapy.

[1314] According to the non-limiting theory herein, higher disease burden can increase the risk of severe CRS. Higher doses of CART cells can improve efficacy, but can also increase the risk of severe CRS. Administering CART cells in a fractionated manner as described herein can reduce the risk of severe CRS, while maintaining efficacy.

### Example 2: Efficacy and Safety of CTL019 in the First US Phase II Multicenter Trial in Pediatric Relapsed/Refractory Acute Lymphoblastic Leukemia: Results of an Interim Analysis

[1315] Background: CTL019 is an investigational therapy derived from autologous T-cells expressing a CD19-specific chimeric antigen receptor (CAR). A single center, phase I/IIa trial of CTL019 showed complete and durable remissions in pediatric/young adult patients (pts) with relapsed/refractory (R/R) B-cell acute lymphoblastic leukemia (B-ALL) (Maude et al NEJM 2014); these results have yet to be reproduced in a multicenter setting. This study reports results from a 6-month interim analysis of the first multicenter phase II trial of an engineered cell therapy in leukemia.
Methods: 9 US sites participated in this single-arm phase II study in pediatric/young adult pts with R/R B-ALL. Leukapheresis products were shipped for centralized manufacturing. T cells were transduced with a lentiviral vector encoding a CAR composed of anti-CD19 scFv, CD3(and 4-1BB domains. Following lymphodepletion with fludarabine and cyclophosphamide, a single dose of CTL019 cells was administered (target dose 2.0-5.0×10⁶ cells/kg for ≤50 kg and 1.0-2.5×10⁸ cells for >50 kg). The primary endpoint was overall remission rate (ORR=CR+CRi [CRi, complete remission with incomplete blood count recovery] maintained at 2 evaluations ≥28 days apart) as determined by an Independent Review Committee. Secondary objectives included minimal residual disease (MRD), relapse-free survival (RFS), overall survival (OS) and safety. All analyses were performed on infused patient set.
Results: 29/35 pts enrolled (82.9%) were infused with CTL019; 6 withdrew prior to infusion (2 manufacturing failures [1 lack of growth, 1 contamination]; 4 deaths [median, 48 days from enrollment; 2 progressive disease, 1 multi-organ failure, 1 pneumonia]). Mean bone marrow involvement at enrollment was 68.2% (SD, 27.3%; Table 36). 2 pts did not receive lymphodepleting chemotherapy due to leukopenia. Collection, manufacturing and infusion were feasible in a multicenter setting with a median time from enrollment to infusion of 37 days. Target cell dose was met in 24/33 (72.7%) manufactured products. ORR in all infused pts was 69.0% (20/29 pts; 98.95% CI 43.6, 88.1). Of the 5 pts who received CTL019 below the target dose, 2 achieved CR/CRi. Of note, deep remission with no evidence of MRD (<0.01%) was achieved in 18/29 pts (62.1%; 95% CI 42.3, 79.3) within 6 months. Median RFS and median survival have not yet been reached. Median duration of follow-up was 6.4 months (range 0.4-14.0). CR/CRi was not achieved in 9 pts: 2 pts died before Day 28 (1 ALL; 1 embolic stroke not attributed to CTL019 at Day 25 after infusion), 6 did not respond and 1 pt achieved CRi at Day 28 but relapsed 17 days later. Of the 20 pts who achieved a CR/CRi, 8 pts relapsed 1.7-7.6 months after onset of remission; 2 were CD19 negative. RFS and OS at 6 months (FIGS. 1A and 1B) were 66.4% and 75.7%, respectively. Serious adverse events occurred in 79.3% of pts within 8 weeks of infusion. Overall 10 deaths occurred at 0.4-8.8 months (9 ALL; 1 embolic stroke); no deaths attributable to CTL019. The most common adverse event was cytokine release syndrome (CRS), which was graded on the Penn scale and managed according to a standardized algorithm. All 26 (89.7%) cases of CRS were reversible; 11 pts (37.9%) had grade 3 or 4 CRS, of which 7 (26.9%) required systemic anti-cytokine therapy, 9 (34.6%) required high dose vasopressors for hypotension, 6 (23.1%) required mechanical ventilation, 4 (15.4%) underwent dialysis. Reversible neuropsychiatric events occurred in 9 (31%) pts (1 grade 3; no grade 4), including seizures in 2 pts but no cases of cerebral edema.
Conclusions: In this first multicenter trial of CAR-modified T cell therapy, CTL019 therapy was feasible and efficacious, showing a high ORR with durable remissions in pediatric/young adult pts with R/R B-ALL. Despite the high rate of toxicity with CTL019 in the R/R setting, the rate of grade 3 or 4 CRS was comparable to the single center study, and standardized management of CRS was successful in a multicenter trial with no deaths attributable to CRS. In this highly refractory population, a vast majority of eligible pts can be successfully infused in a timely fashion and outcomes appear reproducible in a multicenter setting despite a more heterogeneous population than the single center study.

TABLE 36
Demographics and baseline characterstics.

| Patient Characteristics | All patients (N = 29) | |
|---|---|---|
| Age (years); median (range) | 12 | (3-25) |
| Age at initial diagnosis (years); median (range) | 7 | (1-19) |
| Age <10 years at initial diagnosis; n (%) | 17 | (58.6) |
| Prior Hematopoietic Stem Cell Transplant; n (%) | | |
| 0 | 12 | (41.4) |
| 1 | 15 | (51.7) |
| 2 | 2 | (6.9) |
| Disease status; n (%) | | |
| Primary refractory | 2 | (6.9) |
| Chemo-refractory | 2 | (6.9) |
| Relapsed disease | 25 | (86.2) |
| Number of previous therapies; median (range) | 3 | (1-9) |
| Time since initial diagnosis to first relapse (months); median | 26 | (9-108) |
| (range) | | |
| Bone marrow blast count at enrollment (%); mean (SD) | 68.2 | (27.3) |
| CNS status classification at enrollment; n (%) | | |
| CNS 1 | 26 | (89.7) |
| CNS 2 | 3 | (10.3) |

Abbreviations:
CNS, central nervous system,
n, number of patients;
SD, standard deviation

### Example 3: Posterior Reversible Encephalopathy Syndrome (PRES) after Infusion of Anti-BCMA CAR T Cells (CART-BCMA) for Multiple Myeloma: Successful Treatment with Cyclophosphamide

[1316] Neurologic toxicity has been observed in patients treated with anti-CD19 chimeric antigen receptor (CAR) T cells and the anti-CD19/anti-CD3 bispecific T-cell engager blinatumomab. Reported neurotoxicities include both focal deficits (e.g., cranial nerve palsy or hemiparesis) and global abnormalities (e.g., generalized seizures, confusion), often associated with systemic cytokine release syndrome (CRS) but also observed after recovery from or in absence of CRS. CART-BCMA involves ex-vivo-expanded autologous T cells transduced via lentiviral vector to express a 4-1BB/CD3-zeta-based CAR specific for B Cell Maturation Antigen. This Example reports clinical characteristics and management of a severe neurotoxicity observed during a phase 1 study of CART-BCMA in multiple myeloma (MM) (NCT02546167).

[1317] The subject is a 55-year-old female with high-risk IgA lambda MM progressing after 4 prior lines of therapy. Pre-treatment disease manifestations included cytopenias and extramedullary plasmacytomas of the pleura and paravertebral musculature. Bone marrow (BM) was >95% occupied by BCMA+ plasma cells. Pre-treatment brain MRI showed pachymeningeal thickening and enhancement over the left cerebral convexity, possibly due to direct extension of calvarial MM lesions. Pre-treatment examination by a neurologist and CSF cytology showed no evidence of CNS MM.

[1318] The subject received 2×10⁸ CART-BCMA cells, 40% of the planned dose, over two consecutive days, without preceding lymphodepleting chemotherapy; a third planned infusion was held due to fevers. Over the next 4 days, fevers persisted, and hypoxia, pancytopenia and delirium developed. Brain MRI and lumbar puncture on day 4 showed no new abnormalities. Evaluation for infection was negative. These symptoms corresponded with rise in serum IL-6 and other CRS-associated biomarkers. On day 6 after CART-BCMA infusion, two tocilizumab doses were administered for CRS, which led to decline in serum IL-6 and resolution of fevers and hypoxia (FIG. 2, circles and triangles).

[1319] On day 8, the subject became obtunded, prompting intubation and initiation of corticosteroids (methylprednisolone 1000 mg xl, then hydrocortisone 100 mg every 8 hours). Her mental status improved over the subsequent two days, and by day 11 she was extubated, alert, and off steroids. On day 12 she developed a generalized seizure and was again intubated for airway protection and treated with antiepileptic drugs (AED). She again improved and was extubated but, on day 15, developed status epilepticus that required five AEDs to control. Repeat brain MRI showed new diffuse sulcal, cortical, and subcortical T2/FLAIR signal abnormality involving the bilateral frontal, parietal, occipital, posterior temporal, and cerebellar hemispheres, with sulcal effacement concerning for cerebral edema. This deterioration was not associated with recurrence of fevers, other systemic CRS signs/symptoms, or hypertension, but it coincided with striking rise in frequency of circulating, activated (HLA-DR+) CART-BCMA cells (FIG. 2, inverted triangles). Serum levels of CRS-related cytokines continued to decrease, but CSF obtained on day 16 showed marked elevation in IL-6, IL-8, and other CRS-associated cytokines compared to both day-16 serum and day-4 CSF (FIG. 2, squares). CART-BCMA cells were detected in CSF. High-dose methylprednisolone was restarted on day 15 without clinical improvement. On day 17, cyclophosphamide 1.5 g/m² was administered to reduce CART-BCMA cells. Beginning on day 18, alertness and responsiveness improved substantially, and she was extubated on day 20. Corticosteroids were gradually tapered. MRI on day 23 showed near-resolution of cerebral and cerebellar signal abnormalities, which were completely gone on repeat MRI 4 weeks later. Cognitive functioning recovered without long-term neurologic sequelae other than fatigue and mild concentration difficulty attributed to effects of AEDs. The last neurologic symptom to recover was mild difficulty processing visual information. Despite administration of cyclphosphamide and a prolonged corticosteroid course, CART-BCMA cells remained detectable in both blood and marrow at last evaluation, 164 days after infusion, and patient achieved a VGPR lasting 5 months.

[1320] Given the rapid reversibility and MRI appearance, this neurologic syndrome was felt to be most consistent with posterior reversible leukoencephalopathy syndrome (PRES), possibly due to high levels of CRS-related cytokines in CSF, as opposed to encephalitis from direct CART-BCMA cytotoxicity against neuronal tissue. PRES developed amidst improvement in systemic CRS, suggesting a CNS-localized CRS, which may have been due to occult CNS MM encountered by rising CART-BCMA frequency and/or failure of tocilizumab to block IL-6 receptor in the CNS. While steroids achieved only transient clinical improvement, the syndrome resolved rapidly after cytoreduction with cyclophosphamide, without completely eradicating infused CART-BCMA cells, suggesting that this strategy could be considered for cases of life-threatening CAR T cell neurotoxicity.

### Example 4: Treatment with Chimeric Antigen Receptor Modified T Cells Directed Against CD19 (CTL019) Results in Durable Remissions in Patients with Relapsed or Refractory Diffuse Large B Cell Lymphomas of Germinal Center and Non-Germinal Center Origin, “Double Hit” Diffuse Large B Cell Lymphomas, and Transformed Follicular to Diffuse Large B Cell Lymphomas

[1321] BACKGROUND: The cell of origin (COO) of diffuse large B cell lymphoma (DLBCL), germinal center (GC) or non-germinal center (NGC), may have prognostic significance for treatment outcome in first-line and relapsed settings (Lenz et al NEJM 2008; Thieblemont et al JCO 2011). “Double hit” DLBCL (DHL), defined by chromosomal breakpoints affecting the MYC/8q24 locus and a second oncogene locus and arising either from transformation of follicular lymphoma (FL) or de novo, has no effective therapy in the relapsed setting. Since new therapies are needed for poor prognostic groups of relapsed DLBCL patients (pts), we examined the efficacy of treatment with autologous T cells genetically modified to express a chimeric antigen receptor consisting of an external anti-CD19 single chain murine antibody domain with CD3(and 4-1BB signaling domains (CTL019 cells) in pts with relapsed or refractory GC- and NGC-DLBCL, DHL, and transformed FL as part of an ongoing phase IIa clinical trial (NCT02030834).
METHODS: Eligible pts had CD19+ DLBCL with measurable residual disease after primary and salvage therapies, were not eligible for autologous stem cell transplant (ASCT) or had relapsed/residual disease after ASCT, had a limited prognosis (<2 years anticipated survival), and had responsive or stable disease with most recent therapy. COO of DLBCL was determined by immunohistochemistry using Hans' algorithm (Hans et al Blood 2004). Fluorescence in-situ hybridization was performed on diagnostic tissue using Vysis MYC (8q24), BCL2 (18q21) and BCL6 (3q27) break apart probes to determine DHL. DHL was defined by a MYC locus chromosomal translocation with a second translocation involving either BCL2 or BCL6. After steady state apheresis to collect peripheral blood leukocytes, pts received lymphodepleting chemotherapy based on clinical features and past therapies. One to 4 days after chemotherapy, pts received a single intravenous dose of CTL019 cells. Following CTL019 cells, pts received no further therapy. Initial tumor response assessment was performed 3 months after T cell infusion using International Working Group response criteria. Enrollment started in February 2014; data are reported through Jul. 24, 2016.
RESULTS: 13 pts with DLBCL are enrolled and evaluable for response (7 pts GC, 5 pts NGC, 1 undetermined). The median age is 59 years (range: 25-77), male:female ratio 10:3, median number of prior therapies 5 (range: 2-8), and number of pts with prior transplant 7 (54%). At enrollment, Ann Arbor stages were: Stage IV 8 pts (61%), Stage III 1 pt (8%), and Stage II 3 pts (23%) Stage IE 1 pt (8%); 3 pts (23%) had bone marrow involvement. LDH was increased in 8 pts (62%). ECOG PS was 0 in 4 pts (31%) and 1 in 9 pts (69%). Lymphodepleting chemotherapy regimens were bendamustine (90 mg/m2×2; 1 pt), cyclophosphamide (1 gm/m²; 2 pts), radiation-cyclophosphamide (4,000 cGy-750 mg/m²; 1 pt), modified-EPOCH (3 pts), and hyper-fractionated cyclophosphamide (300 mg/m2 q12 hours×6; 6 pts). 12 pts received 5.00E+08 (5.10-6.75E+06 cells/kg) CTL019 cells; 1 pt received 1.93E+08 (3.10E+06 cells/kg). Median peak CTL019 cell expansion in blood occurred 7 days after infusion (range: 2-28 days); there is no difference in peak expansion between responders and non-responders or pts with GC- or NGC-DLBCL. Cytokine release syndrome occurred in 9 pts (8 grade 2; 1 grade 3) and did not predict response. Transient neurotoxicity included delirium in 2/13 pts (1 grade 2; 1 grade 3) and cognitive disturbance in 1/13 pts (1 grade 1). At 3 months post CTL019 infusion, overall response rate (ORR) is 52% (7/13 pts); ORR for GC 71% (5/7 pts) and NGC 40% (2/5 pts). Complete response rate (CR) at 3 months is 38% (5/13 pts); CR for GC 43% (3/7 pts) and NGC 40% (2/5 pts). Best response for all pts is CR in 6 of 13 pts (46%); CR for GC 57% (4/7 pts) and NGC 40% (2/5 pts). 3 of 7 pts with GC-DLBCL had transformed FL and all 3 achieved CR; 2 of 7 pts with GC-DLBCL had DHL and both achieved CR. To date, no pt achieving CR has relapsed. 2 of 5 pts with NGC-DLBCL had T-cell rich DLBCL; neither patient responded to CTL019. Median progression-free survival (PFS) is 5.8 months (mo) for all pts, 3.0 mo for NGC pts, and not reached for GC pts (PFS 57.1% [95% C: 17.2%-83.7%] at median follow up 21.9 mo).
CONCLUSIONS: These results indicate that a single treatment with CTL019 cells is safe and efficacious in relapsed or refractory GC- and NGC-DLBCL, DHL, and transformed FL.

### Example 5: Soluble BCMA in Peripheral Blood Serum is a Useful Minimal Residual Disease Biomarker for Monitoring Patients with Multiple Myeloma, Chronic Lymphocytic Leukemia and Other B Cell Malignancies Following Treatment with CAR-BCMA or CAR-19

[1322] B cell maturation antigen (BCMA) (BCMA) is expressed on the surface of plasma cells, the final differentiation stage of B cells, and usually on multiple myeloma cells. Soluble BCMA (sBCMA) is readily detectable by immunoassay methods in serum or plasma from normal subjects and in patients with certain B cell malignancies. In multiple myeloma (MM), a plasma cell malignancy localized selectively to the bone marrow, serum sBCMA levels can be greatly elevated compared to the normal range in healthy subjects before treatment. Chimeric antigen receptor cell therapy targeting BCMA have been developed for treating MM patients. This Example uses ELISA to examine serum samples from MM patients before and after CAR-BCMA therapy on clinical trial UPCC14415 and shown that serum sBCMA is greatly reduced in patients experiencing CAR-BCMA expansion and persistence after infusion, and returns if the patients subsequently lose CAR-BCMA cells and undergo clinical relapse. Thus sBCMA is an excellent and convenient minimal residual disease (MRD) biomarker for CAR-BCMA efficacy in MM.

[1323] In addition, these experiments test sera from MM patients who received chimeric antigen receptor cell therapy targeting CD19 (CAR19) therapy on trial UPCC02413. It was found that CAR19 expansion post infusion was also associated with sBCMA reduction, and that loss of CAR19 and clinical relapse was accompanied by a rise in sBCMA levels. This is a logical correlation given that precursors to plasma cells express CD19, even though plasma cells themselves do not express CD19. sBCMA levels were then examined in serum samples from patients with other B cell malignancies including chronic lymphocytic leukemia (CLL), acute lymphoblastic leukemia (ALL) and non-Hodgkins lymphoma (NHL) and who were treated with CAR19 therapy. Preliminary data suggests that sBCMA levels are elevated in some CLL patients and decrease following effective CAR19 therapy, suggesting that sBCMA may be a useful MRD biomarker for evaluating efficacy of CD19 therapy in other B cell malignancies.

### Introduction

[1324] B-cell maturation antigen (BCMA), also known as tumor necrosis factor receptor superfamily member 17 (TNFRSF17), is a protein that in humans is encoded by the TNFRSF17 gene. This receptor is preferentially expressed in mature B lymphocytes, and may be important for B cell development and autoimmune response. BCMA has been shown to specifically bind to the tumor necrosis factor (ligand) superfamily, member 13b (TNFSF13B/TALL-1/BAFF), and to lead to NF-kappaB and MAPK8/JNK activation. This receptor also binds to various TRAF family members, and thus may transduce signals for cell survival and proliferation. BCMA is expressed on some activated B cells and Ig-secreting cells; it binds both BAFF and APRIL. BCMA is essential for the maintenance of long-lived plasma cells, an effect mediated by its ligands, APRIL or BAFF. These plasma cells produce IgG that protect not only against pathogens but are also critically involved in autoimmune diseases. Further, BCMA engagement on activated B cells induces MHC class II, enhancing their ability to present antigen. Differentiation of B cells from stem cells in the bone marrow proceeds through immature B cells to mature B cells in the periphery to plasma cells in the bone marrow. While CD19 as a B cell marker is present on all of these except for plasma cells, BCMA is mostly present at high levels on plasma cells, but is also present on some memory B cells and plasmablast cells that express CD19. Note that since plasma cells are not present in the periphery monitoring of these cells by flow cytometry requires a bone marrow sample which, unlike peripheral blood serum, can only be obtained infrequently due to patient care restrictions. Gamma-secretase directly cleaves BCMA, releasing soluble BCMA (sBCMA) which acts as a decoy, neutralizing APRIL. In multiple sclerosis, sBCMA levels in spinal fluid are elevated and associated with intracerebral IgG production, and in systemic lupus erythematosus, sBCMA levels in serum are elevated and correlate with disease activity. In this example, soluble BCMA levels in peripheral blood serum were studied as a surrogate for the level of BCMA-expressing plasma cells in bone marrow. Longitudinal sera were collected from multiple myeloma patients enrolled on a trial of CAR-BCMA. The levels of sBCMA, BAFF and APRIL were measured. Given the strong correlations seen between CAR-BCMA and sBCMA, levels of sBCMA were then examined in multiple myeloma patients treated with CAR-19. Since these results in turn showed that sBCMA levels correlate with successful CAR19 therapy, this analysis was then extended to samples from patients with other B-cell malignancies treated with CAR19. These results support the use of sBCMA as a biomarker for minimal residual disease in several B cell malignancies.

### Materials and Methods

[1325] Patient Serum was processed and stored at −80° C. until use in ELISA assays.

[1326] Note that although multiplexed ELISA was used to measure sBCMA, BAFF and APRIL in serum samples, this was largely due to the objective of measuring all three of these analytes. It would have been possible to utilize a variety of other immunological or physical methods to measure sBCMA, APRIL and BAFF, such as the traditional single analyte ELISA plate assay, single analyte Luminex assay, ProteinSimple, Simoa, SomaLogic, Singulex, Olink.

[1327] DuoSet ELISA kits for human BCMA (DY193), APRIL (DY884B) and BAFF (DT124-05) were purchased from R&D Systems (Minneapolis, Minn.). PBS pH7.2, 10× (70013-032), Tween 20 (003005), Amplex UltraRed reagent (A36006) were all from Thermo Fisher Scientific (Waltham, Mass.). BSA (BSA-50) was from Rockland (Limerick, Pa.). EASYBind 8-well strips (ES58400) was from Azer Scientific (Morgantown, Pa.). DMSO (D8418-50ML), H₂O₂ (H1009-100ML) were from Sigma-Aldrich (St. Louis, Mo.).

[1328] Method to carry out the multiplex ELISA using 8-well strips is as follows. For each analyte, 12 of the strips are enough to test 48 samples in duplicates. Capture antibody (cap AB) diluted in 11 ml of PBS at the working concentration is used to coat every 12 strips in one column of the 4-column reservoir. Gently mix the cap AB with the strips. Seal the 4-column reservoir containing the strips in a Ziploc bag and incubate at room temperature (RT) overnight (ON). On the next day, wash the strips in PBS/0.05% Tween 20 (PBST) 2× and block the strips in 1% BSA/PBS (RD) for 1 hour at RT. Block an assay plate by adding 300 ul/well of RD at the same time. Meanwhile, serum samples cryopreserved at −80° C. with requested time points were thawed. Serum samples diluted at 1:2 in RD were used to test APRIL and BAFF, while serum samples diluted at 1:50, 1:200 or 1:1000 in RD were used to test BCMA. Standard (STD) curves for each analyte was made by diluting STD 1 (5000 pg/ml) at 1:2.5 dilution in RD and continue to STD7. Blank is RD only. At the end of blocking, remove RD from the assay plate and transfer the strips to the corresponding column of an assay plate according to an assay map. Transfer 200 ul of the STDs, blank and samples into each well according to the above assay set-up map. Gently mix the samples with the strips. Seal the assay plate containing the strips in a Ziploc bag and incubate at 4° C. ON. On the next day, block a 4-column reservoir with 20 ml RD/column for 5 minutes. Remove the blocking buffer, and prepare 11 ml of the detection AB/column at working concentration for each analyte using RD. Wash the strips in PBST 2×. Each 12 strips for the same analyte were incubated in one column of the 4-column reservoir containing the corresponding detection AB for 2 hours at RT. Afterwards, wash the strips in PBST 2× and incubate with 11 ml of the corresponding HRP conjugate for 1 hour at RT. Meanwhile, prepare substrate. For every 12 strips, 11 ml of PBS is mixed with 55 ul of the 10 mM Amplex UltraRed and 2.5 ul of 30% H₂O₂. Transfer 100 ul/well of the substrate to a round bottom clear 96-well substrate plate. At the end of HRP incubation, wash the strips in PBST 4×. Transfer each strip to one column of the substrate plate according to a substrate map. Let the color develop for 10 to 30 minutes. Stop the color reaction by removing the strips. Read and analyze the plate using FLUO STAR OMEGA (BMG LABTECH, Ortenberg, Germany) following their protocol.

[1329] Data quality was examined based on the following criteria. The STD curve for each analyte has a R2 value >0.95 at 4-parameter fit based on FLUO STAR analysis software. The results for the in house control should be within the 95% of CI (confidence interval) derived from historical in house control data for the tested analytes. No further tests were done on samples with results out of range low (<OOR) derived from samples at 1:2 dilution. Samples with results that were <OOR derived from higher than 1:2 dilution were re-tested at lower dilutions. Samples with results that were out of range high (>OOR) were re-tested at higher dilutions. Results that passed the above quality controls or retests were used in translational correlative studies.

### Results

[1330] 1. sBCMA, BAFF and APRIL Serum Levels in Multiple Myeloma Patients Treated with CAR-BCMA

[1331] This Example used a multiplex ELISA to measure sBCMA, BAFF and APRIL in longitudinal cryopreserved serum samples from six adult multiple myeloma patients treated with CAR-BCMA on the clinical trial UPCC14415 ‘Pilot Study of Redirected Autologous T Cells Engineered to Contain an Anti-BCMA scFv Coupled to TCRζ and 4-1BB Signaling Domains in Patients With Relapsed and/or Refractory Multiple Myeloma’. The expansion and persistence of CAR-BCMA in the patient peripheral blood was monitored by flow cytometry using a streptavidin tagged human BCMA-Fc fusion protein as a detection reagent, and by qPCR on peripheral blood DNA using primers specific for the 4-1BB costimulatory domain.

[1332] The levels (ng/ml) of serum sBCMA, BAFF and APRIL over time for the first six evaluable UPCC14415 patients on this study were measured (FIG. 3). The Y axis is on a logarithmic scale. Of these six patients only patients 01 and 03 are clinical responders. Patients 02, 09, 10 and 11 are non-responders, in whom the sBCMA levels do not significantly change from baseline which is in the 100s of ng/ml for patients 02, 09 and 11 and in the 1000s for patient 10. In the two patients who do respond to CAR-BCMA therapy and in whom CAR-BCMA proliferate and expand (FIG. 4), the sBCMA levels decline from the baseline level of high 1000s ng/ml by three logs (patient 01), and by about 2.5 logs (patient 03). Notably in both patients this decline is followed after 150 days (patient 01) and 120 days (Patient 03) by a recovery of sBCMA that is more obvious in patient 03.

[1333] FIG. 4 is a plot of CAR-BCMA levels (circles) as measured by qPCR and expressed as copies of the CAR-BCMA construct per microgram of blood DNA vs. serum sBCMA in ng/ml (quares). Only the responding patients 01 and 03 have expansion of CAR-BCMA to >100,000 copies/microgram DNA. In these two patients the sBCMA levels are inversely correlated with CAR-BCMA levels. Patient 1 remains in clinical remission as of day 270. Patient 03 however, relapsed at around day 150, and is the most dramatic example of inverse correlation of sBCMA and CAR-BCMA, as the square and circle lines cross twice, first at 10 days when the sBCMA declines and the CAR-BCMA expand, and again 160 days later as the CAR-BCMA levels drop below 100 copies/microgram and the sBCMA levels rise back above 100 ng/ml. Both these patients experienced cytokine release syndrome (CRS) during their CAR-BCMA expansion period.

[1334] FIG. 3 also shows the BAFF and APRIL levels in serum over time. Briefly, these two analytes are present at lower levels (range 1-20 ng/ml for BAFF and 0-10 ng/ml for APRIL), show less dramatic kinetics than BCMA, and are not as clearly correlated with clinical outcome. There is a 1 to 1.5 log increase in both these two analytes in serum from the two responding patients (01 and 03) during the first 20 days after CAR-BCMA infusion which corresponds to the period of cytokine release syndrome that these two patients experienced. After this period the BAFF and APRIL kinetics are mostly flat.

2. sBCMA, BAFF and APRIL Serum Levels in Multiple Myeloma Patients Treated with CAR19

[1335] In this Example, it was hypothesized that sBCMA levels in serum of multiple myeloma patients might be affected by CAR-19 therapy, since flow cytometry data (data not shown) indicated that some of these patients achieved CD19 aplasia (absence of CD19 cells in their peripheral blood and/or bone marrow mononuclear cells as detected by flow cytometry). Thus sBCMA, BAFF and APRIL levels were tested in serum from eleven multiple myeloma patients, ten enrolled on UPCC02413, and one on UPCC19413, a compassionate use, single patient protocol. FIGS. 5A, 5B and 5C show plots of levels of CAR-19 (circles) as measured by qPCR and expressed as copies of the CAR-19 construct per microgram of blood DNA vs. serum sBCMA in ng/ml (squares). The horizontal dotted line is the average serum sBCMA level of 38.75 ng/ml that was empirically determined by measuring a panel of 14 normal donor sera with the same assay (data not shown). As is clear from FIGS. 5A-5C, there is an inverse correlation between CAR19 levels and serum sBCMA levels in all eleven patients. The most common pattern is expansion of CAR19, peaking at around Day 10, with an immediate decline in sBCMA below the level seen in normal subjects. Typically CAR19 then contract in numbers and drop below the level of detection, although in some patients (02, 07, 12) there is some level of longer-term CAR19 persistence. There is a rebound in serum BCMA that happens at some point. The length of time during which the patient is in sub-normal sBCMA varies greatly, one extreme being UPCC02413-01 who experienced sBCMA rebound at around 500 days after CAR19 infusion. At the other extreme, patient UPCC02413-06 had recovery of sBCMA at about 60 days after CAR-19. In summary, there is very strong evidence that CAR19 therapy in multiple myeloma patients reduces serum sBCMA, and that sBCMA rebounds following loss of CAR19.

3. sBCMA, BAFF and APRIL Serum Levels in Patients with B Cell Malignancies (CLL, ALL, NHL) Treated with CAR19

[1336] Given the results above in multiple myeloma patients treated with CAR19, these studies were expanded to other patients with other B cell malignancies who had been treated with CAR19. Table 37 summarizes the clinical trials, indication, CAR-T therapies and observed sBCMA responses to therapy. The myeloma results have been described above in Sections 1 and 2.

TABLE 37
Summary of clinical trials, indication, CAR-T therapies and sBCMA responses to therapy

| Study | Disease (# patients tested) | Therapy | Serum sBCMA levels |
|---|---|---|---|
| UPCC14415 | Multiple Myeloma (6) | CAR-BCMA | Most much higher than ND, lower |
| | | | after treatment, rebound during relapse |
| UPCC19413 | Multiple Myeloma (1) | mCAR19 | 1 patient, much higher than ND, lower |
| | | | after treatment, rebound during relapse |
| UPCC02413 | Adult Multiple Myeloma (11) | mCAR19 except for | Most much higher than ND, lower |
| | | huCAR19 -10, -12, -03R | after treatment, rebound during relapse |
| UPCC03712 | Adult CLL (2) | mCART19 | Higher than ND, lower after treatment, |
| | | | rebound during relapse |
| UPCC13413 | NHL (2) | mCAR19 except for | Lower than ND |
| | | huCAR19 13413-09, -36 | |
| UPCC19214 | Adult Pancreatic Cancer (3) | huCAR19 + mCART- | ~ND level, lower after treatment |
| | | meso | |
| UPCC21413 | Adult ALL (4) | mCAR19 | Much lower than ND, lower after |
| | | | treatment |
| CHP959 | Pediatric ALL (3) | mCAR19 | Much lower than ND, lower after |
| | | | treatment |
| UPCC31415 | ALL (3) | CAR-22 | Around ND, no obvious treatment |
| | | | effect |

[1337] The results suggest that serum sBCMA levels in ALL and NHL and pancreatic cancer are similar or lower than normal subjects. However, one of the two CLL patients (UPCC03712-1000-00040) is a clinical non-responder with a small expansion of CAR19 around Days 15-20 post infusion, CD19 aplasia at day 21, and then rebound of malignancy by Month 2. The baseline (pre-CAR19 therapy) sBCMA level is much higher than normal range, decreases on CAR19 infusions to normal or lower, and then increases again at month 2 and 3 when the patient relapsed (data not shown). The other patient, (UPCC03712_1000_00045) was a clinical responder with good CAR19 expansion peaking at day 14 post infusion who had a baseline sBCMA level of about 2×normal range, and this decreased with CAR19 therapy to sub-normal range and stayed there out to 1 year (the last timepoint tested) after CAR19 (data not shown). The patient went into CD19 aplasia by Day 14, and stayed in aplasia until Month 5 when the beginning of normal B cell reconstitution was observed.

[1338] Conclusion

[1339] Serum BCMA is a potentially useful biomarker for minimal residual disease in several B cell malignancies. Serum sBCMA is an excellent and convenient minimal residual disease (MRD) biomarker for CAR-BCMA efficacy in multiple myeloma. Serum sBCMA seems to be a very good biomarker for CAR19 efficacy in multiple myeloma. These Experiments suggest serum sBCMA is a marker in CLL, where treatment with CAR19 can reduce serum sBCMA and CD19 relapse is accompanied by elevated sBCMA.

### Example 6: Pilot Study of Anti-CD19 Chimeric Antigen Receptor T Cells (CTL019) in Conjunction with Salvage Autologous Stem Cell Transplantation for Advanced Multiple Myeloma

[1340] Sox2 is a transcription factor that promotes pluripotency and self-renewal, and is implicated in cancer stem cell phenotypes. Anti-Sox2 antibodies are associated with reduced risk of progression in MGUS patients, are generally absent in untreated multiple myeloma and post-ASCT, and emerge in some multiple myeloma patients after allogeneic stem cell transplant. This Example tests the hypothesis that CTL019 would target myeloma stem cells, triggering an immune response encompassing other stem-cell antigens. According to they hypothesis, subjects with most prolonged time-to-progression after ASCT+CTL019 would exhibit anti-Sox2 immune responses.

[1341] It was observed that antibodies against the Sox2 emerged specifically in 2 subjects with most prolonged PFS compared to prior ASCT. More particularly, FIG. 6 shows that subjects 1 and 5 developed anti-Sox2 antibodies after CTL-019 therapy. This was not likely an artifact of general immune reconstitution or low disease burden in these subjects.

### Example 7: Biomarkers of Response to Anti-CD19 Chimeric Antigen Receptor (CAR) T-Cell Therapy in Patients with Chronic Lymphocytic Leukemia

[1342] This Example reports the pharmacokinetics of CTL019 cells in CLL patients. Dramatically different proliferation potential of T cells in responders vs. nonresponders to CTL019 were observed. More particularly, peak expansion and persistence of CTL019 cells was significantly lower in non-responders than every category of responders (CR, PR_{TD}, and PR) (FIG. 7). There were also significant differences in in vitro proliferation, e.g., between non-responders and CR or PR_{TD} (partial response, transfusion dependent) subjects (FIG. 7).

[1343] It was also determined that CD19-directed T cells manufactured from CR and PR_{TD} subjects elaborated higher levels of STAT3 signaling mediators and targets, compared to PRs and NRs, which was consistent with STAT3 pathway upregulation in CAR stimulated CR and PR_{TD} patient CTL019 cells. In particular, IL-6, IL-17, IL-22, IL-31, CCL20, and a STAT3 gene set showed significant differences between different patient populations, e.g., CR, PR_{TD}, PR, and NR (FIG. 8).

[1344] It was also determined that the frequency of CD8+ T_{SCM} cells in pre-manufactured cells predicts response (data not shown). The percent of cells that are CD8+ T_{SCM} was significantly higher in CR or PR_{TD} compared to PR or NR subjects.

[1345] It was also observed that statistically significant lower frequencies of ex vivo CD27+CD45RO− CD8+ patient T cells expressing Ki-67 and elevated levels of granzyme B compared to their CD27+CD45RO+ counterpart (data not shown; p<0.0001).

[1346] Combination of biomarkers were assessed for predicting response to CTL019. Responders versus non-responders could be predicted by the presence of CAR+CD8+ CD27+PD1-cells (AUC=0.92 in a plot of sensitivity versus specificity), CAR+CD8+ CD27+(AUC=0.70), and CAR+CD8+ PD1− (AUC=0.73). Complete responders versus non-responders could be predicted by the presence of CAR+CD8+ CD27+ PD1− cells (AUC=0.94), CAR+CD8+ CD27+ (AUC=0.75), and CAR+CD8+ PD1− (AUC=0.82). There was a highly significant association between the likelihood of having a response to CTL019 therapy and the infusion of CTL019 products containing a high dose of CD8+ PD1-CD27+ CAR T cells.

### Example 8: Cellular Kinetics of CD19-Specific Chimeric Antigen Receptor T Cells (CTL019) in Patients with Chemotherapy Resistant or Refractory CD19+ Leukemias

[1347] CTL019 persistence was measured in patients having ALL (pediatric ALL or adult ALL) or CLL. Patient response was divided into three categories, CR/CRi, PR/PRi, and NR/PD. CTL019 persisted beyond 400 days in all three indications with higher levels in CR/CRi patients. The median T ½ in CR/CRi was −20 days, being only 2 days in NR. Persistence has been observed to 780 days.

[1348] Persistence was also calculated by AUC28. In ALL, a number of CR patients displayed an AUC of above about 5×10⁵ or 1×10⁶ CTL019 genomic DNA×time. In CLL, a number of CR or PR patients displayed an AUC of above about 5×10⁵ or 1×10⁶ CTL019 genomic DNA×time, and a number of NR/PD patients displayed an AUC of below about 1×10⁵ or 5×10⁴. A strong concordance was observed between AUC0-28d, AUC0-84d, and Cmax determined qPCR and flow cytometry.

[1349] In addition, CTL019 trafficking in bone marrow observed beyond 350 days in patients achieving CR/Cri.

### Example 9: Predictors of Manufacturing (MFG) Feasibility for Chimeric Antigen Receptor (CAR) T Cells in Non-Hodgkin Lymphoma (NHL)

[1350] As raw material for CAR T cell manufacture, patient apheresis products show variation due to treatment and disease-related factors. Patient peripheral blood laboratory values were used to identify patients at “high risk” of manufacturing fail prior to collection. This Example also explores various methods to mitigate these risks and increase manufacturing success rate.

[1351] Manufacturing data was analyzed for 45 patients enrolled in a Phase IIa CD19 CAR study, NCT02030834, for relapsed/refractory NHL. Complete blood counts with differential for each patient prior to apheresis was correlated with manufacturing feasibility. Apheresis products were characterized by complete blood count, flow cytometry phenotyping, cell size, and processing pathway. Five manufacturing fails were re-manufactured large scale to produce an infusible dose, and small scale cultures were set up with four products with insufficient T cell growth to test strategies to repair the proliferative capacity.

[1352] Approximately 62% of the patients met the recommended ALC (absolute lymphocyte count) of >500/ul (28/45) at apheresis, and the manufacturing success rate to produce a CAR T product was 93% (2/28 manufacturing fails by cell number and transduction). The manufacturing success rate decreased to 65% for patients with peripheral ALC <500/ul, as 6/17 were manufacturing fails (5/6 due to poor growth). Of patients with ALC <300/ul, 6/10 were manufacturing fails, further reducing the manufacturing success rate to 40%. Overall, infusible CAR T cell product was produced for 37/45 patients (22/28 DLBCL, 13/15 FL, and 2/2 MCL, respectively), for an 82% manufacturing success rate.). Additional NHL apheresis product predictors of manufacturing failure include: AMC <500/uL (27%), <10% lymphocytes (<27%), >60% neutrophils (23%), <25% CD3+CD45+by FACS (38%), >60% monocytes (33%) and <40% lymphocytes (33%). CD4/CD8 ratio did not predict manufacturing failure. PD1 expression on CD4 or CD8 or bulk T cells did not correlate with proliferative capacity. A second manufacturing collection and/or modified enrichment resulted in a success rate upon second manufacture of 100% (5/5). In each case, the second product underwent cryopreservation/thaw prior to culture compared to positive selection on fresh products for the corresponding failures. This was confirmed in side by side small scale cultures.

[1353] These signatures in NHL patient peripheral blood and apheresis products associated with a high risk of manufacturing fail can be used to select processing steps more likely to result in effective T cell enrichment for transduction and expansion.

### Example 10. Efficacy of CTL019 in Inducing CNS Remissions in Relapsed Refractory ALL Pediatric Patients with CNS Involvement

[1354] Sixty pediatric Acute Lymphocytic Leukemia (ALL) patients were enrolled in a Phase 1/2a clinical trial (CH 959) of CTL019. All patients presented with relapsed/refractory CD19+ ALL, and of those seventeen had central nervous system (CNS) involvement. The patients underwent standard chemotherapy and lymphodepletion regimens prior to administration of CTL019. On Day −1, patients were assessed for the status of their disease in the bone marrow (BM), and for CNS involvement via lumbar puncture (LP). CTL019 was then administered to all patients, and a follow-up assessment to evaluate response to therapy was performed on Day 28. As on Day −1, procedures were performed to assess BM and CNS status on Day 28. Follow-ups were also performed at months 3, 6, 9 and 12 to continue monitoring patient's response to therapy (BM and CNS status) and/or disease progression. The outcomes of patients with CNS relapse were evaluated within 12 months of infusion. CNS relapse was defined as: CNS3 status (≥5 WBC/uL with blasts from an lumbar puncture (LP)). Brain/ocular involvement was evaluated by imaging.

[1355] Seventeen of 60 CTL019 treated patients were identified as having a disease with CNS involvement. All 17 patients had a CNS3 status (>5 WBC/uL with blasts from an LP) a median of 4 months prior to infusion, and 3 of those patients had active CNS3 status at time of infusion. Patients ranged from 1st to 7th CNS relapse(s) prior to treatment with CTL019. Ten had isolated CNS relapse and seven had combined BM/CNS relapse. Six patients had ocular involvement and the 3 with active CNS3 had parenchymal changes on brain/spine MRI. Sixteen patients had prior CNS directed radiation and thirteen had undergone prior BMT. CNS relapse was defined as CNS3 by lumbar puncture or brain/ocular involvement by imaging within 12 months of infusion. Table 38 provides a summary of CNS status in all patients.

[1356] As shown in FIG. 9, a complete response (CR) of 93% was observed at Day 28 in this group of patients. CR was subdivided into CR with minimal residual disease (CR, MRD−) or CR without minimal residual disease (CR, MRD+), wherein MRD was defined as <0.01% blasts by flow cytometry. Importantly, all patients had CNS remission, i.e., a 100% CNS remission rate was observed (FIG. 9). Patient response is presented by % ALL blasts in FIG. 9, with 100% CR in groups with <0.01% blasts. Patients who had more than 50% or between 5-50% blasts, had 83% and 88% CR respectively. A small number of patients did not respond to therapy (NR, no response). Cytokine release syndrome (CRS) was observed in 88% of patients, of which 27% had severe CRS.

TABLE 38
CNS status of ALL patients with CNS involvement.

| CNS patient cohort | N = 17 |
|---|---|
| Active CNS3 at time of infusion | 3 |
| Isolated CNS relapse | 10 |
| Combined BM + CNS relapse | 7 |
| No. of prior CNS relapses | 1 to 7 |
| Ocular involvement | 6 |
| Parenchymal changes on neuroimaging | 3 |
| Prior CNS directed radiation | 16 |
| Prior BMT | 13 |

[1357] Importantly, neurotoxicity was not enhanced in the CNS cohort (Table 39). Encephalopathy grade 2-3 was observed in 3/17(18%) CNS vs. 12/43(28%) non-CNS. Seizures grade 2-4 were observed in 1/17(6%) CNS vs. 3/43(7%) non-CNS patients. Vision disturbance, speech disturbance, trigerminal neuralgia and ataxia were only observed in the CNS cohort in 6-12% of patients. Confusion was observed in both groups at low levels, and agitation was only observed in the non-CNS cohort in 5% of patients. Sixteen of 17 patients were CNS1 (no detectable leukemic cells in the cerebrospinal fluid, CSF) on Day 28 post infusion. One patient was not evaluable (N/E) due to rapid progression of disease in the BM. In 2 out of the 3 patients with active CNS3 disease at infusion, 1 was in CR by Day 28, 1 had initial pseudo-progression with CR by 3 months, and the third patient was not evaluable. Twelve of 17 (71%) CNS patients remain in CR 2 to 31 months post-infusion (median 11 months). Five had recurrent BM disease but were CNS negative at relapse. One patient had no response in the BM but this patient's CNS status was not evaluable.

[1358] Of the seventeen patients with CNS involvement in this study, three were Philadelphia chromosome (Ph+) positive. These patients initially presented with 3 to 7 CNS relapses, and remain in a CR state at 8 to 31 months (median 23 months) post CTL019 infusion. None of the 60 patients enrolled in this trial have presented with CNS relapse post-infusion, irrespective of their initial CNS status (i.e., irrespective of whether the patients presented with CNS involvement prior to CTL019 infusion).

[1359] These data suggest that CTL019 as a single agent immunotherapy can induce durable responses in pediatric patients with relapsed/refractory ALL with CNS involvement. Neurotoxicity does not appear to be enhanced in relapsed/refractory ALL patients with CNS involvement compared to relapsed/refractory ALL patients without CNS involvement.

TABLE 39
Summary of toxicities observed in all
ALL patients infused with CTL019

| | | No. of | | | | |
|---|---|---|---|---|---|---|
| | | Patient- | CNS cohort | | Non CNS | |
| Toxicity | Grade | Events | N = 17 | | N = 43 | |
| Seizures | 2 | 2 | 1 | (6%) | 1 | (2%) |
| | 3 | 1 | 0 | | 1 | (2%) |
| | 4 | 1 | 0 | | 1 | (2%) |
| Encephalopathy | 2 | 2 | 0 | | 2 | (4%) |
| | 3 | 14 | 3 | (18%) | 12 | (28%) |
| Vision disturbance | 3 | 1 | 1 | (6%) | 0 | |
| Speech Disturbance | 3 | 2 | 2 | (12%) | 0 | |
| Trigeminal | 3 | 1 | 1 | (6%) | 0 | |
| Neuralgia | | | | | | |
| Confusion | 2 | 3 | 2 | (12%) | 1 | (2%) |

| | | | | | |
|---|---|---|---|---|---|
| Dizziness | 2 | 0 | 0 | 1 | (2%) |

| | | | | | |
|---|---|---|---|---|---|
| Ataxia | 2 | 1 | 1 | (6%) | 0 |

| | | | | | |
|---|---|---|---|---|---|
| Agitation | 2 | 2 | 0 | 2 | (5%) |

### Example 11: Predictors of Manufacturing (MFG) Success for Chimeric Antigen Receptor (CAR) T Cells in Non-Hodgkin Lymphoma (NHL)

[1360] As raw material for CAR T cell manufacture, patient apheresis products show treatment and disease-related variation. Patient peripheral blood laboratory values were used to identify patients at higher risk of manufacturing fail prior to collection. This Example describes various methods to mitigate risk and increase manufacturing success rate of the CAR product.

[1361] Manufacturing data were analyzed for 45 patients enrolled in a Phase IIa CD19 CAR study (NCT02030834) for relapsed/refractory NHL. Apheresis products were characterized by absolute lymphocyte count (ALC), flow cytometry phenotyping and cell size via a multisizer.

[1362] Approximately 62% of patients met the recommended ALC of >500/ul (28/45) at apheresis. The CAR T manufacturing success rate in this group was 93% (2 out of 28 were manufacturing fails) (FIG. 10). The manufacturing success rate decreased to 65% for patients with peripheral ALC <500/ul, as 6 out of 17 were manufacturing fails, of which 5 out of 6 were fails due to poor growth. For patients with ALC <300/ul, 6 out of 10 were manufacturing fails, further reducing the manufacturing success rate to 40%. Overall, infusible CAR T cell product was produced for 37 out of 45 patients, for an 82% manufacturing success rate. FIG. 10 shows the peripheral blood profiles of samples grouped by manufacturing success vs. failure. FIG. 10A shows the ALC in these samples and FIG. 10B shows the % lymphocytes (LY) in the samples. Samples with high manufacturing success rates demonstrate higher starting ALC and more lymphocytes in the periphery. FIGS. 11A-11C further demonstrate the makeup of various immune cell populations in apheresis products grouped by manufacturing success vs. failure. FIG. 11A shows a higher percentage of CD3+CD45+ cells in samples with high manufacturing rates. The samples with high manufacturing rates also had higher % lymphocytes (FIG. 11B) and lower % monocytes (FIG. 11C) in the periphery. In summary, the data showed that apheresis products with >75% monocytes, <23% lymphocytes and <13% CD3+45+ were more likely to fail manufacturing in this study.

[1363] Small scale test expansion was used to model CAR T clinical manufacturing proliferative capacity, and to avoid failure to meet cell number, phenotype, and transduction criteria. The first 10 patients where test expansions were performed passed these tests, and 9 out of 10 samples were successfully manufactured large scale (the 1 manufacturing fail was due to equipment malfunction). Of the initial 10 subjects screened for enrollment in the test expansion study, 4 had ALC <500/ul, but passed the test expansion, and were successfully manufactured. CD4/CD8 ratio did not correlate with manufacturing failure. The level of PD1expression on CD4, CD8, or bulk T cells did not correlate with proliferative capacity.

[1364] A second apheresis collection and/or modified enrichment for manufacture resulted in a success rate of 100% (5 out of 5 samples tested). For each of the samples, the second product underwent a cryopreservation and thaw cycle prior to culture compared to positive selection on fresh products for the corresponding failures. This was confirmed in side by side small scale cultures with the first product (FIGS. 12A-D and Table 40). FIGS. 13A-B shows T cell enrichment post-thaw due to loss of CD45 dim or CD45 negative cells from two patient samples. As further demonstrated in FIGS. 14A-14B, myeloid derived suppressor cells are sensitive to a freeze-thaw cycle (cryopreservation followed by thawing), as indicated by the decrease in CD15+ and CXCR2+ cells post-thaw for two samples. Taken together, the data suggests that cryopreservation enriched T cells and reduced potential suppressive non-lymphoid cell subsets (e.g., myeloid derived suppressor cells (MDSC)) thus improving manufacturing success rates of samples whose fresh cells had previously failed manufacturing.

[1365] Signatures in NHL patient peripheral blood and apheresis products associated with high risk of manufacturing fail can be used to select processing steps more likely to result in effective T cell enrichment, transduction, and expansion. For patients with ALC <500/ul, a small scale test expansion incorporated with select processing steps may predict clinical manufacturing success. This strategy to increase the likelihood of engineered T cell manufacturing success may also be applicable for patients with other hematologic malignancies and cancers.

TABLE 40
Summary of manufacturing results from 5 samples which failed
at the first manufacturing attempt. (MFG = manufacturing)

| Sample | 10 | 28 | 41 | 13 | 19 |
|---|---|---|---|---|---|
| Input cell source | Fresh APH | Fresh APH | Fresh APH | Fresh APH | Fresh APH |
| for 1^{st} MFG run | | | | | |
| Outcome of 1^{st} | FAIL | FAIL | FAIL | FAIL | FAIL |
| MFG run | | | | | |
| Collection for 2^{nd} | 2^{nd} Collection | 2^{nd} Collection | 2^{nd} Collection | 1^{st} Collection | 1^{st} Collection |
| MFG | | | | | |
| Input cell source | Cryopreserved/ | Cryopreserved/ | Cryopreserved/ | Cryopreserved/ | Cryopreserved/ |
| for 2^{nd} MFG run | Thawed | Thawed | Thawed | Thawed | Thawed |
| Outcome of 2^{nd} | SUCCESS | SUCCESS | SUCCESS | SUCCESS | SUCCESS |
| MFG run | | | | | |

### Example 12: CTL019 for the Treatment of Pediatric and Young Adult Patients with Relapsed/Refractory B-Cell Acute Lymphoblastic Leukemia

### Clinical Development Program

[1366] The efficacy and safety of CTL019 has been established in 3 trials involving over 150 pediatric and young adult patients with r/r B-cell ALL (Table 42).

[1367] Study B2101J was the first clinical study conducted in pediatric and young adult patients with r/r CD19+ hematologic malignancies using CTL019 (N=71). The primary objective of this trial was to determine the safety, tolerability, and engraftment potential (duration of in vivo survival measured by qPCR) of tisagenlecleucel in patients with r/r and incurable CD19+B-cell malignancies (CD19+ leukemia or lymphoma). Entry criteria were designed to include pediatric and young adult patients aged 1 to 24 years with CD19+B-cell malignancies with no available curative treatment options (such as autologous or allogeneic SCT) who had a limited prognosis (several months to <2-year survival) with currently available therapies. Up to three infusions and a wide dose range were allowed.

[1368] Study B2205J is a multicenter study conducted in the US and similar both in design and study objectives to the pivotal registration trial (Study B2202). Due to its earlier start date, there is a longer duration of follow-up available for this trial compared to Study B2202. Other differences from Study B2202 included a smaller number of patients enrolled (35 vs. 88 patients, respectively), and the geographical location of the clinical and manufacturing sites. In addition, patients with lymphoblastic lymphoma were allowed to participate in this trial but not in Study B2202.

[1369] Study B2202 is the pivotal registration trial and is a global, multicenter, single-arm, open-label phase II study designed to determine the efficacy and safety of CTL0191 in pediatric and young adult patients with r/r B-cell ALL (N=88). Patients were aged between 3 years at the time of screening and 21 years at the time of initial diagnosis. The single-arm study design was supported by the absence of effective therapies in this setting, and the high unmet medical need of the target patient population.

TABLE 42
Pediatric and young adult r/r B-cell ALL clinical development program

| | | | | |
|---|---|---|---|---|
| Study | Population, study | No. of | Tisagenlecleucel | |
| No. | design, and objectives | patients | allowable dose range | Efficacy endpoints |

Supportive trials

| | | | | |
|---|---|---|---|---|
| B2101J | Single-arm, open-label, | Enrolled: N = 71 | Multiple infusions | Primary: Safety, feasibility |
| | US, single-center, | Infused: N = 55 | Up to a total target dose of | of manufacture, and |
| | phase-I/IIa trial | | 1.5 × 10⁷ to 5 × 10⁹ total T | persistence |
| | Safety, tolerability, and | | cells (0.3 × 10⁶ to | Secondary: IRC-assessed |
| | engraftment potential | | 1.0 × 10⁸/kg) | ORR |
| B2205J | Single-arm, open-label, | Enrolled: N = 35 | Single infusion | Primary: IRC-assessed |
| | US, multicenter, phase- | Infused: N = 29 | ≤50 kg: 0.2 to 5.0 × 10⁶ | ORR |
| | II trial | | transduced viable T cells/kg | Secondary: DoR, BOR, |
| | Efficacy and safety | | >50 kg: 0.1 to 2.5 × 10⁸ | EFS, OS, Safety |
| | | | transduced viable T cells | |

Pivotal registration trial

| | | | | |
|---|---|---|---|---|
| B2202 | Single-arm, open-label, | Enrolled: N = 88 | Single infusion | Primary: IRC-assessed |
| | international, | Infused: N = 68 | ≤50 kg: 0.2 to 5.0 × 10⁶ | ORR |
| | multicenter, phase-II | | transduced viable T cells/kg | Secondary: DoR, BOR, |
| | trial | | >50 kg: 0.1 to 2.5 × 10⁸ | EFS, OS, Safety |
| | Efficacy and safety | | transduced viable T cells | |

ALL Acute lymphoblastic leukemia;
BOR Best overall response;
DoR Duration of remission;
EFS Event-free survival;
IRC Independent Review Committee;
ORR Overall remission rate;
OS Overall survival;
r/r Relapsed/refractory

### Patient Populations

[1370] Patients recruited to Studies B2101J and B2205J were representative of the clinical population of pediatric and young adult patients with r/r B-cell ALL.

[1371] The focus of the Study B2101J analysis was on 55 patients with non-CNS3 ALL who received treatment with CTL019. Median age was 11 years (range: 1 to 24). All patients had a Karnofsky/Lansky performance status score of >50%. Patients were heavily pretreated (89.1% had received >3 and 16.4% had received >6 prior regimens), and 63.6% had undergone prior SCT. Available mutation data were limited.

[1372] Study B2205J enrolled 35 pediatric and young adult patients with r/r B-cell ALL, with a median age of 12 years (range: 3 to 25) (Table 5-2). Twenty-nine patients were infused with CTL019; all had a Karnofsky/Lansky performance status score >50%, and included individuals with high-risk mutations. Patients had received a median of 3 prior therapies (range: 1 to 9) and 58.6% had failed prior allo-SCT.

[1373] In Study B2202, demographic and baseline disease characteristics reflected the target pediatric and young adult patient population with r/r B-cell ALL for whom the drug is intended. The study enrolled patients with r/r B-cell ALL across 25 centers in the US, Canada, the EU, Australia, and Japan. Patients were aged 3 to 23 years (median: 12) with a Karnofsky/Lansky performance status score of >50%. The population consisted of patients with high-risk mutations following a median of 3 prior therapies (range: 1 to 8), with 58.8% of patients having failed prior allo-SCT.

### Dose-Selection Rationale

### Clinical Target Dose

[1374] The initial dose selection for the first clinical study (Study B2102J) with CTL019 was based on in vivo models of ALL in which human pre-B ALL cells were engrafted into immunodeficient mice. These mice received doses of 1, 5, and 20×10⁶ cells. Anti-leukemic treatment effects were observed, supporting further investigation of doses of 5 and 20×10⁶ cells in mouse models.

[1375] Formal dose-escalation studies were not conducted. The target CTL019 doses for Studies B2202 and B2205J were:
[1376] 2.0 to 5.0×10⁶ transduced viable T-cells per kg body weight for patients ≤50 kg
[1377] 1.0 to 2.5×10⁸ transduced viable T cells for patients >50 kg

[1378] Importantly, once infused, the transduced cells are expected to expand in vivo and there appears to be no clear relationship between CTL019 dose and expansion across the wide dose range tested.

### Allowable Infused Dose Ranges

[1379] In the early clinical studies the target dose was not always achieved due to characteristics of the collected cells, and yet responses were observed; as a result, an allowable dose range was established for Studies B2202 and B2205J:
[1380] 0.2 to 5.0×10⁶ transduced viable T cells per kg for patients ≤50 kg
[1381] 0.1 to 2.5×10⁸ transduced viable T cells for patients >50 kg.

### Dose-Response Analysis for CTL019

[1382] FIGS. 15A and 15B show dose-response curves for patients ≤50 kg (FIG. 15A) or for patients >50 kg (FIG. 15B) administered with a range of doses of CTL019. Patients ≤50 kg showed an increasing trend in the probability of response for doses up to 2.0×10⁶ transduced viable T cells/kg with a plateau for higher doses (e.g., doses >2.4×10⁶ transduced viable T cells/kg)(FIG. 15A). Responses were also observed at the lowest dose tested, i.e., 0.2×10⁶ transduced viable T cells/kg.

[1383] For patients >50 kg, FIG. 15B demonstrates a similar trend in the probability of response for doses up to 1.0×10⁸, with a plateau for higher doses. In this patient group, responses were also observed at the lowest dose tested, i.e., 0.2×10⁸. For both patient cohorts, clinical benefit was evident at lower doses.

### Example 13: Clinical Pharmacology and Biopharmaceutics in Pediatric Patients with Relapsed or Refractory Acute Lymphoblastic Leukemia

[1384] Data from two phase 2 studies (ELIANA; NCT02435849 and ENSIGN; NCT02228096) in pediatric and young adult R/R B-cell ALL were pooled to evaluate the cellular kinetics of CTL019, humoral immunogenicity, AUC 0-28d (exposure)-response analysis, and impact of intrinsic, extrinsic and manufacturing factors on CTL019 expansion.

### Methods

[1385] Cellular kinetic parameters of CTL019 post infusion were derived using traditional pharmacokinetic principles and reported by response category (complete response [CR]/CR with incomplete blood count recovery [CRi] vs no response [NR]) using 2 assays of peripheral blood cells: qPCR and flow cytometry. AUC 0-28d-response relationships were evaluated by logistic regression. Relationships between manufacturing specifications, therapies for cytokine release syndrome (CRS) management, and anti-CAR19 antibodies on cellular kinetics were explored using summary statistics and graphical- and model-based analyses.

### Results

[1386] Data from 79 pts (ELIANA, n=50; ENSIGN, n=29) were pooled for analysis. Using qPCR, pts with CR/CRi (n=62) had about a 2-fold higher CTL019 expansion than patients with NR (n=7) (Cmax, 73.5% higher geometric [geo] mean; AUC0-28d, 104% higher geo mean; Table 41). Patients with NR had delayed Tmax compared with patients with CR/CRi (20 vs 10 days). Intrinsic patient factors including baseline cytogenetics, disease characteristics, and disease status did not appear to affect Cmax or AUC0-28d with the exception that patients with a higher tumor burden at enrollment generally had higher expansion, based on box plots and summary statistics. Extrinsic factors (e.g., prior lines of therapy or stem cell transplant) and parameters related to the manufactured product (e.g., % T cells, transduction efficiency, cell viability, or total cell count), did not appear to impact cellular kinetics, based on graphical analysis. AUC0-28d increased with presence and severity of CRS. Patients who received anti-cytokine agents for grade 3/4 CRS also had higher expansion. CR/CRi patients treated with tocilizumab and steroids (n=17) had 89% higher AUC0-28d than CR patients who did not receive tocilizumab and steroids (n=45). Moderate correlation was observed between transgene levels and CAR surface expression in peripheral blood (r2=0.592) by qPCR and flow cytometry, respectively, when matched by time points from the cellular kinetic profile. Slower B-cell recovery was observed in patients with AUC0-28d above the median. Post-dose anti-CAR19 antibody responses were determined from the fold change of anti-CAR19 antibodies above the baseline pre-dose value. Patients with treatment-induced or boosted anti-CAR19 antibody responses generally had lower expansion, based on box plots, compared with patients with treatment-unaffected anti-CAR19 antibody responses, although AUC0-28d was variable. The boosted levels of anti-CAR19 did not impact clinical response or relapse.

TABLE 41

| Parameter | Statistics | CR/CRi (n = 62) | | NR (n = 7) | |
|---|---|---|---|---|---|
| AUC0-28 d | n | 61 | | 6 | |
| (copies/μg DNA × days) | CR/CRi fold change over NR | 2.0 | | | |
| Cmax (copies/μg) | n | 61 | | 7 | |
| | CR/CRi fold change over NR | 1.7 | | | |
| Tmax (days) | n | 61 | | 7 | |
| | Median (range) | 9.91 | (0.00784-27.0) | 20.0 | (0.0276-62.7) |
| T½ (days) | n | 54 | | 3 | |
| | Median (range) | 14.8 | (2.03-208) | 1.46 | (1.12-9.65) |

* Unknown response, n = 10

### Conclusion

[1387] There was increased expansion of CTL019 in patients with higher tumor burden at enrollment, which correlated with higher CRS grade. A relationship between dose and expansion was not observed, thereby supporting the wide dose range used. Expansion was not attenuated, e.g., by tocilizumab or steroids, indicating therapies for CRS, e.g., do not abrogate CTL019 proliferation. Cellular kinetics are important to understand the determinants of tumor response with CAR T-cell therapy.

### EQUIVALENTS

[1388] The disclosures of each and every patent, patent application, and publication cited herein are hereby incorporated herein by reference in their entirety. While this invention has been disclosed with reference to specific aspects, it is apparent that other aspects and variations of this invention may be devised by others skilled in the art without departing from the true spirit and scope of the invention. The appended claims are intended to be construed to include all such aspects and equivalent variations.

1. (canceled)

2. A method of treating a subject having a hematological cancer, comprising administering to the subject a plurality of cells that express a chimeric antigen receptor (CAR) molecule, wherein the CAR molecule is:
(i) a murine CAR molecule that binds to CD19, and wherein the hematological cancer is acute lymphoid leukemia (ALL);
(ii) a humanized CAR molecule that binds to CD19; or
(iii) a CAR molecule that binds to BCMA,
wherein the plurality of CAR-expressing cells is administered at a dose of about 0.2×10⁶ to 5.0×10⁶ viable CAR-expressing cells/kg, when the subject weighs ≤50 kg; or at a dose of about 0.1×10⁸ to 2.5×10⁸ viable CAR-expressing cells, when the subject weighs >50 kg.

3. The or method of claim 2, wherein the plurality of cells is administered at:
(i) a dose of about 0.2×10⁶ to 2.0×10⁶, about 0.2×10⁶ to 1.8×10⁶, about 0.2×10⁶ to 1.6×10⁶, about 0.2×10⁶ to 1.4×10⁶, about 0.2×10⁶ to 1.2×10⁶, about 0.2×10⁶ to 1.0×10⁶, about 0.2×10⁶ to 0.8×10⁶, about 0.2×10⁶ to 0.6×10⁶, or about 0.2×10⁶ to 0.4×10⁶ viable CAR-expressing cells/kg, when the subject weighs ≤50 kg;
(ii) a dose of about 0.2×10⁶, about 0.4×10⁶, about 0.6×10⁶, about 0.8×10⁶, about 1.0×10⁶, about 1.5×10⁶, about 2.0×10⁶, about 2.5×10⁶, about 3.0×10⁶, about 3.5×10⁶, about 4.0×10⁶, about 4.5×10⁶, or about 5.0×10⁶ viable CAR-expressing cells/kg, when the subject weighs ≤50 kg;
(iii) a dose of about 0.1×10⁸ to 1.0×10⁸, about 0.1×10⁸ to 0.9×10⁸, about 0.1×10⁸ to 0.8×10⁸, about 0.1×10⁸ to 0.6×10⁸, about 0.1×10⁸ to 0.4×10⁸, about 0.1×10⁸ to 0.2×10⁸, about 0.2×10⁸ to 1.0×10⁸, about 0.2×10⁸ to 0.9 10⁸, about 0.2×10⁸ to 0.8×10⁸, about 0.2×10⁸ to 0.6×10⁸, or about 0.2×10⁸ to 0.4×10⁸ viable CAR-expressing cells, when the subject weighs >50 kg; or
(iv) a dose of about 0.1×10⁸, about 0.2×10⁸, about 0.4×10⁸, about 0.6×10⁸, about 0.8×10⁸, about 1.0×10⁸, about 1.5×10⁸, about 2.0×10⁸, or about 2.5×10⁸ viable CAR-expressing cells, when the subject weighs >50 kg.

4. The method of claim 2, wherein the subject is a pediatric or young adult, or an adult.

5. (canceled)

6. The method of claim 2, wherein the hematological cancer is acute lymphoid leukemia (ALL).

7. (canceled)

8. A method of treating a subject having a hematological cancer, comprising administering to the subject at least two doses of a plurality of cells that express a chimeric antigen receptor (CAR) molecule, wherein the CAR molecule is:
(i) a murine CAR molecule that binds to CD19, and wherein the hematological cancer is acute lymphoid leukemia (ALL);
(ii) a humanized CAR molecule that binds to CD19; or
(iii) a CAR molecule that binds to BCMA,
wherein the at least two doses together add up to a total dose of at least about 0.2×10⁶ viable CAR-expressing cells/kg, when the subject weighs ≤50 kg; or a total dose of at least about 0.1×10⁸ viable CAR-expressing cells, when the subject weighs >50 kg.

9. The method of claim 8, wherein the at least two doses are administered separately with a time interval of about one day.

10. The method of claim 8, wherein the at least two doses comprise a first dose, a second dose, and a third dose, wherein the first dose is administered on a first day of treatment, the second dose is administered on a subsequent day of treatment, and the third dose is administered on a yet subsequent day of treatment.

11. The method of claim 10, wherein:
(i) the first dose is administered on the first day of treatment, the second dose is administered on the second day of treatment, and the third dose is administered on the third day of treatment;
(ii) the first dose is about 10% of the total dose, the second dose is about 30% of the total dose, and the third dose is about 60% of the total dose; or
(iii) the total dose is about 5×10⁷ to 5×10⁸ viable CAR-expressing cells.

12. (canceled)

13. (canceled)

14. The method of claim 8 wherein the subject is a pediatric or young adult; or an adult.

15. (canceled)

16. The method of claim 8, wherein the hematological cancer is acute lymphoid leukemia (ALL).

17. A method of evaluating the effectiveness of a CAR-expressing cell therapy in a subject having a hematological cancer, who has received or is receiving the CAR-expressing cell therapy, comprising measuring soluble BCMA (sBCMA) level or activity in the subject at least two time points after the beginning of the CAR-expressing cell therapy, wherein:
(i) a decrease in the sBCMA level or activity over time indicates that the CAR-expressing cell therapy is effective in the subject; or
(ii) the absence of a decrease in the sBCMA level or activity over time indicates that the CAR-expressing cell therapy has reduced efficacy,
thereby evaluating the subject.

18. (canceled)

19. (canceled)

20. (canceled)

21. A method of treating a subject having hematological cancer, who has received or is receiving a first CAR-expressing cell therapy, comprising measuring soluble BCMA (sBCMA) level or activity in the subject at at least two time points after the beginning of the first CAR-expressing cell therapy, wherein if the sBCMA level or activity does not decrease over time, administer a second therapy to the subject, thereby treating the subject.

22. (canceled)

23. (canceled)

24. A method of monitoring cancer relapse in a subject having hematological cancer, who has responded or partially responded to a CAR-expressing cell therapy, comprising measuring soluble BCMA (sBCMA) level or activity in the subject at at least two time points after the subject responded or partially responded to the CAR-expressing cell therapy, wherein:
(i) an increase in the sBCMA level or activity over time indicates that the cancer is relapsing; or
(ii) the absence of an increase, in the sBCMA level or activity over time indicates that the cancer is not relapsing.

25. (canceled)

26. (canceled)

27. (canceled)

28. (canceled)

29. The method of claim 21, wherein the second therapy comprises a B cell inhibitor.

30. (canceled)

31. (canceled)

32. (canceled)

33. (canceled)

34. (canceled)

35. The method of claim 1, wherein the murine CAR molecule that binds to CD19 comprises:
(i) one or more of a heavy chain complementarity determining region 1 (HCDR1), HCDR2, and HCDR3 of any CD19 scFv domain amino acid sequence listed in Table 3 and one or more of a light chain complementarity determining region 1 (LCDR1), LCDR2, and LCDR3 of any CD19 scFv domain amino acid sequence listed in Table 3;
(ii) a heavy chain variable region (VH) of any CD19 scFv domain amino acid sequence listed in Table 3 and a light chain variable region (VL) of any CD19 scFv domain amino acid sequence listed in Table 3;
(iii) a CD19 scFv domain amino acid sequence listed in Table 3; or
(iv) a full-length CD19 CAR amino acid sequence listed in Table 3.

36. The method of claim 1, wherein the humanized CAR molecule that binds to CD19 comprises:
(i) one or more of a heavy chain complementarity determining region 1 (HCDR1), HCDR2, and HCDR3 of any CD19 scFv domain amino acid sequence listed in Table 2 and one or more of a light chain complementarity determining region 1 (LCDR1), LCDR2, and LCDR3 of any CD19 scFv domain amino acid sequence listed in Table 2;
(ii) a heavy chain variable region (VH) of any CD19 scFv domain amino acid sequence listed in Table 2 and a light chain variable region (VL) of any CD19 scFv domain amino acid sequence listed in Table 2;
(iii) a CD19 scFv domain amino acid sequence listed in Table 2; or
(iv) a full-length CD19 CAR amino acid sequence listed in Table 2.

37. The method of claim 1, wherein the CAR molecule that binds to BCMA comprises:
(i) one or more of a heavy chain complementarity determining region 1 (HCDR1), HCDR2, and HCDR3 of any CD19 scFv domain amino acid sequence listed in Table 4D or 4E and one or more of light chain complementarity determining region 1 (LCDR1), LCDR2, and LCDR3 of any CD19 scFv domain amino acid sequence listed in Table 4D or 4E;
(ii) a heavy chain variable region (VH) listed in Table 4D or 4E and a light chain variable region (VL) listed in Table 4D or 4E;
(iii) a BCMA scFv domain amino acid sequence listed in Table 4D or 4E; or
(iv) a full-length BCMA CAR amino acid sequence listed in Table 4D or 4E.

38. The method of claim 1, wherein the CAR molecule comprises:
(i) a scFv;
(ii) a transmembrane domain of a protein selected from the group consisting of the alpha, beta or zeta chain of the T-cell receptor, CD28, CD3 epsilon, CD45, CD4, CD5, CD8, CD9, CD16, CD22, CD33, CD37, CD64, CD8, CD86, CD134, CD137 and CD154;
(iii) a hinge region comprising SEQ ID NO: 14, or a sequence with 95-99% identity thereof;
(iv) a costimulatory domain from a protein selected from the group consisting of OX40, CD2, CD27, CD28, CDS, ICAM-1, LFA-1 (CD11a/CD18), ICOS (CD278), and 4-1BB (CD137), wherein optionally the costimulatory domain comprises the amino acid sequence of SEQ ID NO:16 or 51;
(v) an intracellular signaling domain comprising a functional signaling domain of 4-1BB and/or a functional signaling domain of CD3 zeta; or
(vi) a leader sequence.

39. The method of claim 1, wherein the plurality of cells comprises T cells or NK cells.

40. The method of claim 1, wherein the hematological cancer is chosen from acute leukemia, B-cell acute lymphoid leukemia (BALL), T-cell acute lymphoid leukemia (TALL), small lymphocytic leukemia (SLL), acute lymphoid leukemia (ALL), chronic leukemia, chronic myelogenous leukemia (CML), chronic lymphocytic leukemia (CLL), non-Hodgkin lymphoma, or multiple myeloma.

41. (canceled)

42. (canceled)

43. (canceled)

The application's sequence listing, which the Patent Office published only in electronic form, follows.

SEQUENCE LISTING (4002 sequences)

SEQ ID NO: 1 - protein, 242 aa, Artificial Sequence
  source: /note="Description of Artificial Sequence: Synthetic polypeptide"
EIVMTQSPATLSLSPGERATLSCRASQDISKYLNWYQQKPGQAPRLLIYHTSRLHSGIPARFSGSGSGTDYTLTISSLQPEDFAVYFCQQGNTLPYTFGQGTKLEIKGGGGSGGGGSGGGGSQVQLQESGPGLVKPSETLSLTCTVSGVSLPDYGVSWIRQPPGKGLEWIGVIWGSETTYYSSSLKSRVTISKDNSKNQVSLKLSSVTAADTAVYYCAKHYYYGGSYAMDYWGQGTLVTVSS

SEQ ID NO: 2 - protein, 242 aa, Artificial Sequence
  source: /note="Description of Artificial Sequence: Synthetic polypeptide"
EIVMTQSPATLSLSPGERATLSCRASQDISKYLNWYQQKPGQAPRLLIYHTSRLHSGIPARFSGSGSGTDYTLTISSLQPEDFAVYFCQQGNTLPYTFGQGTKLEIKGGGGSGGGGSGGGGSQVQLQESGPGLVKPSETLSLTCTVSGVSLPDYGVSWIRQPPGKGLEWIGVIWGSETTYYQSSLKSRVTISKDNSKNQVSLKLSSVTAADTAVYYCAKHYYYGGSYAMDYWGQGTLVTVSS

SEQ ID NO: 3 - protein, 242 aa, Artificial Sequence
  source: /note="Description of Artificial Sequence: Synthetic polypeptide"
QVQLQESGPGLVKPSETLSLTCTVSGVSLPDYGVSWIRQPPGKGLEWIGVIWGSETTYYSSSLKSRVTISKDNSKNQVSLKLSSVTAADTAVYYCAKHYYYGGSYAMDYWGQGTLVTVSSGGGGSGGGGSGGGGSEIVMTQSPATLSLSPGERATLSCRASQDISKYLNWYQQKPGQAPRLLIYHTSRLHSGIPARFSGSGSGTDYTLTISSLQPEDFAVYFCQQGNTLPYTFGQGTKLEIK

SEQ ID NO: 4 - protein, 242 aa, Artificial Sequence
  source: /note="Description of Artificial Sequence: Synthetic polypeptide"
QVQLQESGPGLVKPSETLSLTCTVSGVSLPDYGVSWIRQPPGKGLEWIGVIWGSETTYYQSSLKSRVTISKDNSKNQVSLKLSSVTAADTAVYYCAKHYYYGGSYAMDYWGQGTLVTVSSGGGGSGGGGSGGGGSEIVMTQSPATLSLSPGERATLSCRASQDISKYLNWYQQKPGQAPRLLIYHTSRLHSGIPARFSGSGSGTDYTLTISSLQPEDFAVYFCQQGNTLPYTFGQGTKLEIK

SEQ ID NO: 5 - protein, 247 aa, Artificial Sequence
  source: /note="Description of Artificial Sequence: Synthetic polypeptide"
EIVMTQSPATLSLSPGERATLSCRASQDISKYLNWYQQKPGQAPRLLIYHTSRLHSGIPARFSGSGSGTDYTLTISSLQPEDFAVYFCQQGNTLPYTFGQGTKLEIKGGGGSGGGGSGGGGSGGGGSQVQLQESGPGLVKPSETLSLTCTVSGVSLPDYGVSWIRQPPGKGLEWIGVIWGSETTYYSSSLKSRVTISKDNSKNQVSLKLSSVTAADTAVYYCAKHYYYGGSYAMDYWGQGTLVTVSS

SEQ ID NO: 6 - protein, 247 aa, Artificial Sequence
  source: /note="Description of Artificial Sequence: Synthetic polypeptide"
EIVMTQSPATLSLSPGERATLSCRASQDISKYLNWYQQKPGQAPRLLIYHTSRLHSGIPARFSGSGSGTDYTLTISSLQPEDFAVYFCQQGNTLPYTFGQGTKLEIKGGGGSGGGGSGGGGSGGGGSQVQLQESGPGLVKPSETLSLTCTVSGVSLPDYGVSWIRQPPGKGLEWIGVIWGSETTYYQSSLKSRVTISKDNSKNQVSLKLSSVTAADTAVYYCAKHYYYGGSYAMDYWGQGTLVTVSS

SEQ ID NO: 7 - protein, 247 aa, Artificial Sequence
  source: /note="Description of Artificial Sequence: Synthetic polypeptide"
QVQLQESGPGLVKPSETLSLTCTVSGVSLPDYGVSWIRQPPGKGLEWIGVIWGSETTYYSSSLKSRVTISKDNSKNQVSLKLSSVTAADTAVYYCAKHYYYGGSYAMDYWGQGTLVTVSSGGGGSGGGGSGGGGSGGGGSEIVMTQSPATLSLSPGERATLSCRASQDISKYLNWYQQKPGQAPRLLIYHTSRLHSGIPARFSGSGSGTDYTLTISSLQPEDFAVYFCQQGNTLPYTFGQGTKLEIK

SEQ ID NO: 8 - protein, 247 aa, Artificial Sequence
  source: /note="Description of Artificial Sequence: Synthetic polypeptide"
QVQLQESGPGLVKPSETLSLTCTVSGVSLPDYGVSWIRQPPGKGLEWIGVIWGSETTYYQSSLKSRVTISKDNSKNQVSLKLSSVTAADTAVYYCAKHYYYGGSYAMDYWGQGTLVTVSSGGGGSGGGGSGGGGSGGGGSEIVMTQSPATLSLSPGERATLSCRASQDISKYLNWYQQKPGQAPRLLIYHTSRLHSGIPARFSGSGSGTDYTLTISSLQPEDFAVYFCQQGNTLPYTFGQGTKLEIK

SEQ ID NO: 9 - protein, 247 aa, Artificial Sequence
  source: /note="Description of Artificial Sequence: Synthetic polypeptide"
EIVMTQSPATLSLSPGERATLSCRASQDISKYLNWYQQKPGQAPRLLIYHTSRLHSGIPARFSGSGSGTDYTLTISSLQPEDFAVYFCQQGNTLPYTFGQGTKLEIKGGGGSGGGGSGGGGSGGGGSQVQLQESGPGLVKPSETLSLTCTVSGVSLPDYGVSWIRQPPGKGLEWIGVIWGSETTYYNSSLKSRVTISKDNSKNQVSLKLSSVTAADTAVYYCAKHYYYGGSYAMDYWGQGTLVTVSS

SEQ ID NO: 10 - protein, 247 aa, Artificial Sequence
  source: /note="Description of Artificial Sequence: Synthetic polypeptide"
QVQLQESGPGLVKPSETLSLTCTVSGVSLPDYGVSWIRQPPGKGLEWIGVIWGSETTYYNSSLKSRVTISKDNSKNQVSLKLSSVTAADTAVYYCAKHYYYGGSYAMDYWGQGTLVTVSSGGGGSGGGGSGGGGSGGGGSEIVMTQSPATLSLSPGERATLSCRASQDISKYLNWYQQKPGQAPRLLIYHTSRLHSGIPARFSGSGSGTDYTLTISSLQPEDFAVYFCQQGNTLPYTFGQGTKLEIK

SEQ ID NO: 11 - protein, 242 aa, Artificial Sequence
  source: /note="Description of Artificial Sequence: Synthetic polypeptide"
EIVMTQSPATLSLSPGERATLSCRASQDISKYLNWYQQKPGQAPRLLIYHTSRLHSGIPARFSGSGSGTDYTLTISSLQPEDFAVYFCQQGNTLPYTFGQGTKLEIKGGGGSGGGGSGGGGSQVQLQESGPGLVKPSETLSLTCTVSGVSLPDYGVSWIRQPPGKGLEWIGVIWGSETTYYNSSLKSRVTISKDNSKNQVSLKLSSVTAADTAVYYCAKHYYYGGSYAMDYWGQGTLVTVSS

SEQ ID NO: 12 - protein, 242 aa, Artificial Sequence
  source: /note="Description of Artificial Sequence: Synthetic polypeptide"
QVQLQESGPGLVKPSETLSLTCTVSGVSLPDYGVSWIRQPPGKGLEWIGVIWGSETTYYNSSLKSRVTISKDNSKNQVSLKLSSVTAADTAVYYCAKHYYYGGSYAMDYWGQGTLVTVSSGGGGSGGGGSGGGGSEIVMTQSPATLSLSPGERATLSCRASQDISKYLNWYQQKPGQAPRLLIYHTSRLHSGIPARFSGSGSGTDYTLTISSLQPEDFAVYFCQQGNTLPYTFGQGTKLEIK

SEQ ID NO: 13 - protein, 21 aa, Artificial Sequence
  source: /note="Description of Artificial Sequence: Synthetic peptide"
MALPVTALLLPLALLLHAARP

SEQ ID NO: 14 - protein, 45 aa, Artificial Sequence
  source: /note="Description of Artificial Sequence: Synthetic polypeptide"
TTTPAPRPPTPAPTIASQPLSLRPEACRPAAGGAVHTRGLDFACD

SEQ ID NO: 15 - protein, 24 aa, Artificial Sequence
  source: /note="Description of Artificial Sequence: Synthetic peptide"
IYIWAPLAGTCGVLLLSLVITLYC

SEQ ID NO: 16 - protein, 42 aa, Artificial Sequence
  source: /note="Description of Artificial Sequence: Synthetic polypeptide"
KRGRKKLLYIFKQPFMRPVQTTQEEDGCSCRFPEEEEGGCEL

SEQ ID NO: 17 - protein, 112 aa, Artificial Sequence
  source: /note="Description of Artificial Sequence: Synthetic polypeptide"
RVKFSRSADAPAYKQGQNQLYNELNLGRREEYDVLDKRRGRDPEMGGKPRRKNPQEGLYNELQKDKMAEAYSEIGMKGERRRGKGHDGLYQGLSTATKDTYDALHMQALPPR

SEQ ID NO: 18 - protein, 5 aa, Artificial Sequence
  source: /note="Description of Artificial Sequence: Synthetic peptide"
GGGGS

SEQ ID NO: 19 - protein, 10 aa, Artificial Sequence
  source: /note="Description of Artificial Sequence: Synthetic peptide"
GVSLPDYGVS

SEQ ID NO: 20 - protein, 16 aa, Artificial Sequence
  source: /note="Description of Artificial Sequence: Synthetic peptide"
VIWGSETTYYNSALKS

SEQ ID NO: 21 - protein, 16 aa, Artificial Sequence
  source: /note="Description of Artificial Sequence: Synthetic peptide"
VIWGSETTYYSSSLKS

SEQ ID NO: 22 - protein, 16 aa, Artificial Sequence
  source: /note="Description of Artificial Sequence: Synthetic peptide"
VIWGSETTYYQSSLKS

SEQ ID NO: 23 - protein, 16 aa, Artificial Sequence
  source: /note="Description of Artificial Sequence: Synthetic peptide"
VIWGSETTYYNSSLKS

SEQ ID NO: 24 - protein, 12 aa, Artificial Sequence
  source: /note="Description of Artificial Sequence: Synthetic peptide"
HYYYGGSYAMDY

SEQ ID NO: 25 - protein, 11 aa, Artificial Sequence
  source: /note="Description of Artificial Sequence: Synthetic peptide"
RASQDISKYLN

SEQ ID NO: 26 - protein, 7 aa, Artificial Sequence
  source: /note="Description of Artificial Sequence: Synthetic peptide"
HTSRLHS

SEQ ID NO: 27 - protein, 9 aa, Artificial Sequence
  source: /note="Description of Artificial Sequence: Synthetic peptide"
QQGNTLPYT

SEQ ID NO: 28 - DNA, 5000 bp, Artificial Sequence
  source: /note="Description of Artificial Sequence: Synthetic polynucleotide"
  misc_feature (1)..(5000): /note="This sequence may encompass 50-5000 nucleotides"
aaaaaaaaaaaaaaaaaaaaaaaaaaaaaaaaaaaaaaaaaaaaaaaaaaaaaaaaaaaaaaaaaaaaaaaaaaaaaaaaaaaaaaaaaaaaaaaaaaaaaaaaaaaaaaaaaaaaaaaaaaaaaaaaaaaaaaaaaaaaaaaaaaaaaaaaaaaaaaaaaaaaaaaaaaaaaaaaaaaaaaaaaaaaaaaaaaaaaaaaaaaaaaaaaaaaaaaaaaaaaaaaaaaaaaaaaaaaaaaaaaaaaaaaaaaaaaaaaaaaaaaaaaaaaaaaaaaaaaaaaaaaaaaaaaaaaaaaaaaaaaaaaaaaaaaaaaaaaaaaaaaaaaaaaaaaaaaaaaaaaaaaaaaaaaaaaaaaaaaaaaaaaaaaaaaaaaaaaaaaaaaaaaaaaaaaaaaaaaaaaaaaaaaaaaaaaaaaaaaaaaaaaaaaaaaaaaaaaaaaaaaaaaaaaaaaaaaaaaaaaaaaaaaaaaaaaaaaaaaaaaaaaaaaaaaaaaaaaaaaaaaaaaaaaaaaaaaaaaaaaaaaaaaaaaaaaaaaaaaaaaaaaaaaaaaaaaaaaaaaaaaaaaaaaaaaaaaaaaaaaaaaaaaaaaaaaaaaaaaaaaaaaaaaaaaaaaaaaaaaaaaaaaaaaaaaaaaaaaaaaaaaaaaaaaaaaaaaaaaaaaaaaaaaaaaaaaaaaaaaaaaaaaaaaaaaaaaaaaaaaaaaaaaaaaaaaaaaaaaaaaaaaaaaaaaaaaaaaaaaaaaaaaaaaaaaaaaaaaaaaaaaaaaaaaaaaaaaaaaaaaaaaaaaaaaaaaaaaaaaaaaaaaaaaaaaaaaaaaaaaaaaaaaaaaaaaaaaaaaaaaaaaaaaaaaaaaaaaaaaaaaaaaaaaaaaaaaaaaaaaaaaaaaaaaaaaaaaaaaaaaaaaaaaaaaaaaaaaaaaaaaaaaaaaaaaaaaaaaaaaaaaaaaaaaaaaaaaaaaaaaaaaaaaaaaaaaaaaaaaaaaaaaaaaaaaaaaaaaaaaaaaaaaaaaaaaaaaaaaaaaaaaaaaaaaaaaaaaaaaaaaaaaaaaaaaaaaaaaaaaaaaaaaaaaaaaaaaaaaaaaaaaaaaaaaaaaaaaaaaaaaaaaaaaaaaaaaaaaaaaaaaaaaaaaaaaaaaaaaaaaaaaaaaaaaaaaaaaaaaaaaaaaaaaaaaaaaaaaaaaaaaaaaaaaaaaaaaaaaaaaaaaaaaaaaaaaaaaaaaaaaaaaaaaaaaaaaaaaaaaaaaaaaaaaaaaaaaaaaaaaaaaaaaaaaaaaaaaaaaaaaaaaaaaaaaaaaaaaaaaaaaaaaaaaaaaaaaaaaaaaaaaaaaaaaaaaaaaaaaaaaaaaaaaaaaaaaaaaaaaaaaaaaaaaaaaaaaaaaaaaaaaaaaaaaaaaaaaaaaaaaaaaaaaaaaaaaaaaaaaaaaaaaaaaaaaaaaaaaaaaaaaaaaaaaaaaaaaaaaaaaaaaaaaaaaaaaaaaaaaaaaaaaaaaaaaaaaaaaaaaaaaaaaaaaaaaaaaaaaaaaaaaaaaaaaaaaaaaaaaaaaaaaaaaaaaaaaaaaaaaaaaaaaaaaaaaaaaaaaaaaaaaaaaaaaaaaaaaaaaaaaaaaaaaaaaaaaaaaaaaaaaaaaaaaaaaaaaaaaaaaaaaaaaaaaaaaaaaaaaaaaaaaaaaaaaaaaaaaaaaaaaaaaaaaaaaaaaaaaaaaaaaaaaaaaaaaaaaaaaaaaaaaaaaaaaaaaaaaaaaaaaaaaaaaaaaaaaaaaaaaaaaaaaaaaaaaaaaaaaaaaaaaaaaaaaaaaaaaaaaaaaaaaaaaaaaaaaaaaaaaaaaaaaaaaaaaaaaaaaaaaaaaaaaaaaaaaaaaaaaaaaaaaaaaaaaaaaaaaaaaaaaaaaaaaaaaaaaaaaaaaaaaaaaaaaaaaaaaaaaaaaaaaaaaaaaaaaaaaaaaaaaaaaaaaaaaaaaaaaaaaaaaaaaaaaaaaaaaaaaaaaaaaaaaaaaaaaaaaaaaaaaaaaaaaaaaaaaaaaaaaaaaaaaaaaaaaaaaaaaaaaaaaaaaaaaaaaaaaaaaaaaaaaaaaaaaaaaaaaaaaaaaaaaaaaaaaaaaaaaaaaaaaaaaaaaaaaaaaaaaaaaaaaaaaaaaaaaaaaaaaaaaaaaaaaaaaaaaaaaaaaaaaaaaaaaaaaaaaaaaaaaaaaaaaaaaaaaaaaaaaaaaaaaaaaaaaaaaaaaaaaaaaaaaaaaaaaaaaaaaaaaaaaaaaaaaaaaaaaaaaaaaaaaaaaaaaaaaaaaaaaaaaaaaaaaaaaaaaaaaaaaaaaaaaaaaaaaaaaaaaaaaaaaaaaaaaaaaaaaaaaaaaaaaaaaaaaaaaaaaaaaaaaaaaaaaaaaaaaaaaaaaaaaaaaaaaaaaaaaaaaaaaaaaaaaaaaaaaaaaaaaaaaaaaaaaaaaaaaaaaaaaaaaaaaaaaaaaaaaaaaaaaaaaaaaaaaaaaaaaaaaaaaaaaaaaaaaaaaaaaaaaaaaaaaaaaaaaaaaaaaaaaaaaaaaaaaaaaaaaaaaaaaaaaaaaaaaaaaaaaaaaaaaaaaaaaaaaaaaaaaaaaaaaaaaaaaaaaaaaaaaaaaaaaaaaaaaaaaaaaaaaaaaaaaaaaaaaaaaaaaaaaaaaaaaaaaaaaaaaaaaaaaaaaaaaaaaaaaaaaaaaaaaaaaaaaaaaaaaaaaaaaaaaaaaaaaaaaaaaaaaaaaaaaaaaaaaaaaaaaaaaaaaaaaaaaaaaaaaaaaaaaaaaaaaaaaaaaaaaaaaaaaaaaaaaaaaaaaaaaaaaaaaaaaaaaaaaaaaaaaaaaaaaaaaaaaaaaaaaaaaaaaaaaaaaaaaaaaaaaaaaaaaaaaaaaaaaaaaaaaaaaaaaaaaaaaaaaaaaaaaaaaaaaaaaaaaaaaaaaaaaaaaaaaaaaaaaaaaaaaaaaaaaaaaaaaaaaaaaaaaaaaaaaaaaaaaaaaaaaaaaaaaaaaaaaaaaaaaaaaaaaaaaaaaaaaaaaaaaaaaaaaaaaaaaaaaaaaaaaaaaaaaaaaaaaaaaaaaaaaaaaaaaaaaaaaaaaaaaaaaaaaaaaaaaaaaaaaaaaaaaaaaaaaaaaaaaaaaaaaaaaaaaaaaaaaaaaaaaaaaaaaaaaaaaaaaaaaaaaaaaaaaaaaaaaaaaaaaaaaaaaaaaaaaaaaaaaaaaaaaaaaaaaaaaaaaaaaaaaaaaaaaaaaaaaaaaaaaaaaaaaaaaaaaaaaaaaaaaaaaaaaaaaaaaaaaaaaaaaaaaaaaaaaaaaaaaaaaaaaaaaaaaaaaaaaaaaaaaaaaaaaaaaaaaaaaaaaaaaaaaaaaaaaaaaaaaaaaaaaaaaaaaaaaaaaaaaaaaaaaaaaaaaaaaaaaaaaaaaaaaaaaaaaaaaaaaaaaaaaaaaaaaaaaaaaaaaaaaaaaaaaaaaaaaaaaaaaaaaaaaaaaaaaaaaaaaaaaaaaaaaaaaaaaaaaaaaaaaaaaaaaaaaaaaaaaaaaaaaaaaaaaaaaaaaaaaaaaaaaaaaaaaaaaaaaaaaaaaaaaaaaaaaaaaaaaaaaaaaaaaaaaaaaaaaaaaaaaaaaaaaaaaaaaaaaaaaaaaaaaaaaaaaaaaaaaaaaaaaaaaaaaaaaaaaaaaaaaaaaaaaaaaaaaaaaaaaaaaaaaaaaaaaaaaaaaaaaaaaaaaaaaaaaaaaaaaaaaaaaaaaaaaaaaaaaaaaaaaaaaaaaaaaaaaaaaaaaaaaaaaaaaaaaaaaaaaaaaaaaaaaaaaaaaaaaaaaaaaaaaaaaaaaaaaaaaaaaaaaaaaaaaaaaaaaaaaaaaaaaaaaaaaaaaaaaaaaaaaaaaaaaaaaaaaaaaaaaaaaaaaaaaaaaaaaaaaaaaaaaaaaaaaaaaaaaaaaaaaaaaaaaaaaaaaaaaaaaaaaaaaaaaaaaaaaaaaaaaaaaaaaaaaaaaaaaaaaaaaaaaaaaaaaaaaaaaaaaaaaaaaaaaaaaaaaaaaaaaaaaaaaaaaaaaaaaaaaaaaaaaaaaaaaaaaaaaaaaaaaaaaaaaaaaaaaaaaaaaaaaaaaaaaaaaaaaaaaaaaaaaaaaaaaaaaaaaaaaaaaaaaaaaaaaaaaaaaaaaaaaaaaaaaaaaaaaaaaaaaaaaaaaaaaaaaaaaaaaaaaaaaaaaaaaaaaaaaaaaaaaaaaaaaaaaaaaaaaaaaaaaaaaaaaaaaaaaaaaaaaaaaaaaaaaaaaaaaaaaaaaaaaaaaaaaaaaaaaaaaaaaaaaaaaaaaaaaaaaaaaaaaaaaaaaaaaaaaaaaaaaaaaaaaaaaaaaaaaaaaaaaaaaaaaaaaaaaaaaaaaaaaaaaaaaaaaaaaaaaaaaaaaaaaaaaaaaaaaaaaaaaaaaaaaaaaaaaaaaaaaaaaaaaaaaaaaaaaaaaaaaaaaaaaaaaaaaaaaaaaaaaaaaaaaaaaaaaaaaaaaaaaaaaaaaaaaaaaaaaaaaaaaaaaaaaaaaaaaaaaaaaaaaaaaaaaaaaaaaaaaaaaaaaaaaaaaaaaaaaaaaaaaaaaaaaaaaaaaaaaaaaaaaaaaaaaaaaaaaaaaaaaaaaaaaaaaaaaaaaaaaaaaaaaaaaaaaaaaaaaaaaaaaaaaaaaaaaaaaaaaaaaaaaaaaaaaaaaaaaaaaaaaaaaaaaaaaaaaaaaaaaaaaaaaaaaaaaaaaaaaaaaaaaaaaaaaaaaaaaaaaaaaaaaaaaaaaaaaaaaaaaaaaaaaaaaaaaaaaaaaaaaaaaaaaaaaaaaaaaaaaaaaaaaaaaaaaaaaaaaaaaaaaaaaaaaaaaaaaaaaaaaaaaaaaaaaaaaaaaaaaaaaaaaaaaaaaaaaaaaaaaaaaaaaaaaaaaaaaaaaaaaaaaaaaaaaaaaaaaaaaaaaaaaaaaaaaaaaaaaaaaaaaaaaaaaaaaaaaaaaaaaaaaaaaaaaaaaaaaaaaaaaaaaaaaaaaaaa

SEQ ID NO: 29-30 - skipped (2 entries)

SEQ ID NO: 31 - protein, 486 aa, Artificial Sequence
  source: /note="Description of Artificial Sequence: Synthetic polypeptide"
MALPVTALLLPLALLLHAARPEIVMTQSPATLSLSPGERATLSCRASQDISKYLNWYQQKPGQAPRLLIYHTSRLHSGIPARFSGSGSGTDYTLTISSLQPEDFAVYFCQQGNTLPYTFGQGTKLEIKGGGGSGGGGSGGGGSQVQLQESGPGLVKPSETLSLTCTVSGVSLPDYGVSWIRQPPGKGLEWIGVIWGSETTYYSSSLKSRVTISKDNSKNQVSLKLSSVTAADTAVYYCAKHYYYGGSYAMDYWGQGTLVTVSSTTTPAPRPPTPAPTIASQPLSLRPEACRPAAGGAVHTRGLDFACDIYIWAPLAGTCGVLLLSLVITLYCKRGRKKLLYIFKQPFMRPVQTTQEEDGCSCRFPEEEEGGCELRVKFSRSADAPAYKQGQNQLYNELNLGRREEYDVLDKRRGRDPEMGGKPRRKNPQEGLYNELQKDKMAEAYSEIGMKGERRRGKGHDGLYQGLSTATKDTYDALHMQALPPR

SEQ ID NO: 32 - protein, 486 aa, Artificial Sequence
  source: /note="Description of Artificial Sequence: Synthetic polypeptide"
MALPVTALLLPLALLLHAARPEIVMTQSPATLSLSPGERATLSCRASQDISKYLNWYQQKPGQAPRLLIYHTSRLHSGIPARFSGSGSGTDYTLTISSLQPEDFAVYFCQQGNTLPYTFGQGTKLEIKGGGGSGGGGSGGGGSQVQLQESGPGLVKPSETLSLTCTVSGVSLPDYGVSWIRQPPGKGLEWIGVIWGSETTYYQSSLKSRVTISKDNSKNQVSLKLSSVTAADTAVYYCAKHYYYGGSYAMDYWGQGTLVTVSSTTTPAPRPPTPAPTIASQPLSLRPEACRPAAGGAVHTRGLDFACDIYIWAPLAGTCGVLLLSLVITLYCKRGRKKLLYIFKQPFMRPVQTTQEEDGCSCRFPEEEEGGCELRVKFSRSADAPAYKQGQNQLYNELNLGRREEYDVLDKRRGRDPEMGGKPRRKNPQEGLYNELQKDKMAEAYSEIGMKGERRRGKGHDGLYQGLSTATKDTYDALHMQALPPR

SEQ ID NO: 33 - protein, 486 aa, Artificial Sequence
  source: /note="Description of Artificial Sequence: Synthetic polypeptide"
MALPVTALLLPLALLLHAARPQVQLQESGPGLVKPSETLSLTCTVSGVSLPDYGVSWIRQPPGKGLEWIGVIWGSETTYYSSSLKSRVTISKDNSKNQVSLKLSSVTAADTAVYYCAKHYYYGGSYAMDYWGQGTLVTVSSGGGGSGGGGSGGGGSEIVMTQSPATLSLSPGERATLSCRASQDISKYLNWYQQKPGQAPRLLIYHTSRLHSGIPARFSGSGSGTDYTLTISSLQPEDFAVYFCQQGNTLPYTFGQGTKLEIKTTTPAPRPPTPAPTIASQPLSLRPEACRPAAGGAVHTRGLDFACDIYIWAPLAGTCGVLLLSLVITLYCKRGRKKLLYIFKQPFMRPVQTTQEEDGCSCRFPEEEEGGCELRVKFSRSADAPAYKQGQNQLYNELNLGRREEYDVLDKRRGRDPEMGGKPRRKNPQEGLYNELQKDKMAEAYSEIGMKGERRRGKGHDGLYQGLSTATKDTYDALHMQALPPR

SEQ ID NO: 34 - protein, 486 aa, Artificial Sequence
  source: /note="Description of Artificial Sequence: Synthetic polypeptide"
MALPVTALLLPLALLLHAARPQVQLQESGPGLVKPSETLSLTCTVSGVSLPDYGVSWIRQPPGKGLEWIGVIWGSETTYYQSSLKSRVTISKDNSKNQVSLKLSSVTAADTAVYYCAKHYYYGGSYAMDYWGQGTLVTVSSGGGGSGGGGSGGGGSEIVMTQSPATLSLSPGERATLSCRASQDISKYLNWYQQKPGQAPRLLIYHTSRLHSGIPARFSGSGSGTDYTLTISSLQPEDFAVYFCQQGNTLPYTFGQGTKLEIKTTTPAPRPPTPAPTIASQPLSLRPEACRPAAGGAVHTRGLDFACDIYIWAPLAGTCGVLLLSLVITLYCKRGRKKLLYIFKQPFMRPVQTTQEEDGCSCRFPEEEEGGCELRVKFSRSADAPAYKQGQNQLYNELNLGRREEYDVLDKRRGRDPEMGGKPRRKNPQEGLYNELQKDKMAEAYSEIGMKGERRRGKGHDGLYQGLSTATKDTYDALHMQALPPR

SEQ ID NO: 35 - protein, 491 aa, Artificial Sequence
  source: /note="Description of Artificial Sequence: Synthetic polypeptide"
MALPVTALLLPLALLLHAARPEIVMTQSPATLSLSPGERATLSCRASQDISKYLNWYQQKPGQAPRLLIYHTSRLHSGIPARFSGSGSGTDYTLTISSLQPEDFAVYFCQQGNTLPYTFGQGTKLEIKGGGGSGGGGSGGGGSGGGGSQVQLQESGPGLVKPSETLSLTCTVSGVSLPDYGVSWIRQPPGKGLEWIGVIWGSETTYYSSSLKSRVTISKDNSKNQVSLKLSSVTAADTAVYYCAKHYYYGGSYAMDYWGQGTLVTVSSTTTPAPRPPTPAPTIASQPLSLRPEACRPAAGGAVHTRGLDFACDIYIWAPLAGTCGVLLLSLVITLYCKRGRKKLLYIFKQPFMRPVQTTQEEDGCSCRFPEEEEGGCELRVKFSRSADAPAYKQGQNQLYNELNLGRREEYDVLDKRRGRDPEMGGKPRRKNPQEGLYNELQKDKMAEAYSEIGMKGERRRGKGHDGLYQGLSTATKDTYDALHMQALPPR

SEQ ID NO: 36 - protein, 491 aa, Artificial Sequence
  source: /note="Description of Artificial Sequence: Synthetic polypeptide"
MALPVTALLLPLALLLHAARPEIVMTQSPATLSLSPGERATLSCRASQDISKYLNWYQQKPGQAPRLLIYHTSRLHSGIPARFSGSGSGTDYTLTISSLQPEDFAVYFCQQGNTLPYTFGQGTKLEIKGGGGSGGGGSGGGGSGGGGSQVQLQESGPGLVKPSETLSLTCTVSGVSLPDYGVSWIRQPPGKGLEWIGVIWGSETTYYQSSLKSRVTISKDNSKNQVSLKLSSVTAADTAVYYCAKHYYYGGSYAMDYWGQGTLVTVSSTTTPAPRPPTPAPTIASQPLSLRPEACRPAAGGAVHTRGLDFACDIYIWAPLAGTCGVLLLSLVITLYCKRGRKKLLYIFKQPFMRPVQTTQEEDGCSCRFPEEEEGGCELRVKFSRSADAPAYKQGQNQLYNELNLGRREEYDVLDKRRGRDPEMGGKPRRKNPQEGLYNELQKDKMAEAYSEIGMKGERRRGKGHDGLYQGLSTATKDTYDALHMQALPPR

SEQ ID NO: 37 - protein, 491 aa, Artificial Sequence
  source: /note="Description of Artificial Sequence: Synthetic polypeptide"
MALPVTALLLPLALLLHAARPQVQLQESGPGLVKPSETLSLTCTVSGVSLPDYGVSWIRQPPGKGLEWIGVIWGSETTYYSSSLKSRVTISKDNSKNQVSLKLSSVTAADTAVYYCAKHYYYGGSYAMDYWGQGTLVTVSSGGGGSGGGGSGGGGSGGGGSEIVMTQSPATLSLSPGERATLSCRASQDISKYLNWYQQKPGQAPRLLIYHTSRLHSGIPARFSGSGSGTDYTLTISSLQPEDFAVYFCQQGNTLPYTFGQGTKLEIKTTTPAPRPPTPAPTIASQPLSLRPEACRPAAGGAVHTRGLDFACDIYIWAPLAGTCGVLLLSLVITLYCKRGRKKLLYIFKQPFMRPVQTTQEEDGCSCRFPEEEEGGCELRVKFSRSADAPAYKQGQNQLYNELNLGRREEYDVLDKRRGRDPEMGGKPRRKNPQEGLYNELQKDKMAEAYSEIGMKGERRRGKGHDGLYQGLSTATKDTYDALHMQALPPR

SEQ ID NO: 38 - protein, 491 aa, Artificial Sequence
  source: /note="Description of Artificial Sequence: Synthetic polypeptide"
MALPVTALLLPLALLLHAARPQVQLQESGPGLVKPSETLSLTCTVSGVSLPDYGVSWIRQPPGKGLEWIGVIWGSETTYYQSSLKSRVTISKDNSKNQVSLKLSSVTAADTAVYYCAKHYYYGGSYAMDYWGQGTLVTVSSGGGGSGGGGSGGGGSGGGGSEIVMTQSPATLSLSPGERATLSCRASQDISKYLNWYQQKPGQAPRLLIYHTSRLHSGIPARFSGSGSGTDYTLTISSLQPEDFAVYFCQQGNTLPYTFGQGTKLEIKTTTPAPRPPTPAPTIASQPLSLRPEACRPAAGGAVHTRGLDFACDIYIWAPLAGTCGVLLLSLVITLYCKRGRKKLLYIFKQPFMRPVQTTQEEDGCSCRFPEEEEGGCELRVKFSRSADAPAYKQGQNQLYNELNLGRREEYDVLDKRRGRDPEMGGKPRRKNPQEGLYNELQKDKMAEAYSEIGMKGERRRGKGHDGLYQGLSTATKDTYDALHMQALPPR

SEQ ID NO: 39 - protein, 491 aa, Artificial Sequence
  source: /note="Description of Artificial Sequence: Synthetic polypeptide"
MALPVTALLLPLALLLHAARPEIVMTQSPATLSLSPGERATLSCRASQDISKYLNWYQQKPGQAPRLLIYHTSRLHSGIPARFSGSGSGTDYTLTISSLQPEDFAVYFCQQGNTLPYTFGQGTKLEIKGGGGSGGGGSGGGGSGGGGSQVQLQESGPGLVKPSETLSLTCTVSGVSLPDYGVSWIRQPPGKGLEWIGVIWGSETTYYNSSLKSRVTISKDNSKNQVSLKLSSVTAADTAVYYCAKHYYYGGSYAMDYWGQGTLVTVSSTTTPAPRPPTPAPTIASQPLSLRPEACRPAAGGAVHTRGLDFACDIYIWAPLAGTCGVLLLSLVITLYCKRGRKKLLYIFKQPFMRPVQTTQEEDGCSCRFPEEEEGGCELRVKFSRSADAPAYKQGQNQLYNELNLGRREEYDVLDKRRGRDPEMGGKPRRKNPQEGLYNELQKDKMAEAYSEIGMKGERRRGKGHDGLYQGLSTATKDTYDALHMQALPPR

SEQ ID NO: 40 - protein, 491 aa, Artificial Sequence; identical to SEQ ID NO: 39
  source: /note="Description of Artificial Sequence: Synthetic polypeptide"

SEQ ID NO: 41 - protein, 491 aa, Artificial Sequence
  source: /note="Description of Artificial Sequence: Synthetic polypeptide"
MALPVTALLLPLALLLHAARPQVQLQESGPGLVKPSETLSLTCTVSGVSLPDYGVSWIRQPPGKGLEWIGVIWGSETTYYNSSLKSRVTISKDNSKNQVSLKLSSVTAADTAVYYCAKHYYYGGSYAMDYWGQGTLVTVSSGGGGSGGGGSGGGGSGGGGSEIVMTQSPATLSLSPGERATLSCRASQDISKYLNWYQQKPGQAPRLLIYHTSRLHSGIPARFSGSGSGTDYTLTISSLQPEDFAVYFCQQGNTLPYTFGQGTKLEIKTTTPAPRPPTPAPTIASQPLSLRPEACRPAAGGAVHTRGLDFACDIYIWAPLAGTCGVLLLSLVITLYCKRGRKKLLYIFKQPFMRPVQTTQEEDGCSCRFPEEEEGGCELRVKFSRSADAPAYKQGQNQLYNELNLGRREEYDVLDKRRGRDPEMGGKPRRKNPQEGLYNELQKDKMAEAYSEIGMKGERRRGKGHDGLYQGLSTATKDTYDALHMQALPPR

SEQ ID NO: 42 - protein, 486 aa, Artificial Sequence
  source: /note="Description of Artificial Sequence: Synthetic polypeptide"
MALPVTALLLPLALLLHAARPEIVMTQSPATLSLSPGERATLSCRASQDISKYLNWYQQKPGQAPRLLIYHTSRLHSGIPARFSGSGSGTDYTLTISSLQPEDFAVYFCQQGNTLPYTFGQGTKLEIKGGGGSGGGGSGGGGSQVQLQESGPGLVKPSETLSLTCTVSGVSLPDYGVSWIRQPPGKGLEWIGVIWGSETTYYNSSLKSRVTISKDNSKNQVSLKLSSVTAADTAVYYCAKHYYYGGSYAMDYWGQGTLVTVSSTTTPAPRPPTPAPTIASQPLSLRPEACRPAAGGAVHTRGLDFACDIYIWAPLAGTCGVLLLSLVITLYCKRGRKKLLYIFKQPFMRPVQTTQEEDGCSCRFPEEEEGGCELRVKFSRSADAPAYKQGQNQLYNELNLGRREEYDVLDKRRGRDPEMGGKPRRKNPQEGLYNELQKDKMAEAYSEIGMKGERRRGKGHDGLYQGLSTATKDTYDALHMQALPPR

SEQ ID NO: 43 - protein, 112 aa, Homo sapiens
RVKFSRSADAPAYQQGQNQLYNELNLGRREEYDVLDKRRGRDPEMGGKPRRKNPQEGLYNELQKDKMAEAYSEIGMKGERRRGKGHDGLYQGLSTATKDTYDALHMQALPPR

SEQ ID NO: 44 - DNA, 336 bp, Homo sapiens
agagtgaagttcagcaggagcgcagacgcccccgcgtaccagcagggccagaaccagctctataacgagctcaatctaggacgaagagaggagtacgatgttttggacaagagacgtggccgggaccctgagatggggggaaagccgagaaggaagaaccctcaggaaggcctgtacaatgaactgcagaaagataagatggcggaggcctacagtgagattgggatgaaaggcgagcgccggaggggcaaggggcacgatggcctttaccagggtctcagtacagccaccaaggacacctacgacgcccttcacatgcaggccctgccccctcgc

SEQ ID NO: 45 - protein, 230 aa, Artificial Sequence
  source: /note="Description of Artificial Sequence: Synthetic polypeptide"
ESKYGPPCPPCPAPEFLGGPSVFLFPPKPKDTLMISRTPEVTCVVVDVSQEDPEVQFNWYVDGVEVHNAKTKPREEQFNSTYRVVSVLTVLHQDWLNGKEYKCKVSNKGLPSSIEKTISKAKGQPREPQVYTLPPSQEEMTKNQVSLTCLVKGFYPSDIAVEWESNGQPENNYKTTPPVLDSDGSFFLYSRLTVDKSRWQEGNVFSCSVMHEALHNHYTQKSLSLSLGKM

SEQ ID NO: 46 - DNA, 690 bp, Artificial Sequence
  source: /note="Description of Artificial Sequence: Synthetic polynucleotide"
gagagcaagtacggccctccctgccccccttgccctgcccccgagttcctgggcggacccagcgtgttcctgttcccccccaagcccaaggacaccctgatgatcagccggacccccgaggtgacctgtgtggtggtggacgtgtcccaggaggaccccgaggtccagttcaactggtacgtggacggcgtggaggtgcacaacgccaagaccaagccccgggaggagcagttcaatagcacctaccgggtggtgtccgtgctgaccgtgctgcaccaggactggctgaacggcaaggaatacaagtgtaaggtgtccaacaagggcctgcccagcagcatcgagaaaaccatcagcaaggccaagggccagcctcgggagccccaggtgtacaccctgccccctagccaagaggagatgaccaagaaccaggtgtccctgacctgcctggtgaagggcttctaccccagcgacatcgccgtggagtgggagagcaacggccagcccgagaacaactacaagaccaccccccctgtgctggacagcgacggcagcttcttcctgtacagccggctgaccgtggacaagagccggtggcaggagggcaacgtctttagctgctccgtgatgcacgaggccctgcacaaccactacacccagaagagcctgagcctgtccctgggcaagatg

SEQ ID NO: 47 - protein, 282 aa, Artificial Sequence
  source: /note="Description of Artificial Sequence: Synthetic polypeptide"
RWPESPKAQASSVPTAQPQAEGSLAKATTAPATTRNTGRGGEEKKKEKEKEEQEERETKTPECPSHTQPLGVYLLTPAVQDLWLRDKATFTCFVVGSDLKDAHLTWEVAGKVPTGGVEEGLLERHSNGSQSQHSRLTLPRSLWNAGTSVTCTLNHPSLPPQRLMALREPAAQAPVKLSLNLLASSDPPEAASWLLCEVSGFSPPNILLMWLEDQREVNTSGFAPARPPPQPGSTTFWAWSVLRVPAPPSPQPATYTCVVSHEDSRTLLNASRSLEVSYVTDH

SEQ ID NO: 48 - DNA, 847 bp, Artificial Sequence
  source: /note="Description of Artificial Sequence: Synthetic polynucleotide"
aggtggcccgaaagtcccaaggcccaggcatctagtgttcctactgcacagccccaggcagaaggcagcctagccaaagctactactgcacctgccactacgcgcaatactggccgtggcggggaggagaagaaaaaggagaaagagaaagaagaacaggaagagagggagaccaagacccctgaatgtccatcccatacccagccgctgggcgtctatctcttgactcccgcagtacaggacttgtggcttagagataaggccacctttacatgtttcgtcgtgggctctgacctgaaggatgcccatttgacttgggaggttgccggaaaggtacccacagggggggttgaggaagggttgctggagcgccattccaatggctctcagagccagcactcaagactcacccttccgagatccctgtggaacgccgggacctctgtcacatgtactctaaatcatcctagcctgcccccacagcgtctgatggcccttagagagccagccgcccaggcaccagttaagcttagcctgaatctgctcgccagtagtgatcccccagaggccgccagctggctcttatgcgaagtgtccggctttagcccgcccaacatcttgctcatgtggctggaggaccagcgagaagtgaacaccagcggcttcgctccagcccggcccccaccccagccgggttctaccacattctgggcctggagtgtcttaagggtcccagcaccacctagcccccagccagccacatacacctgtgttgtgtcccatgaagatagcaggaccctgctaaatgcttctaggagtctggaggtttcctacgtgactgaccatt

SEQ ID NO: 49 - protein, 10 aa, Artificial Sequence
  source: /note="Description of Artificial Sequence: Synthetic peptide"
GGGGSGGGGS

SEQ ID NO: 50 - DNA, 30 bp, Artificial Sequence
  source: /note="Description of Artificial Sequence: Synthetic oligonucleotide"
ggtggcggaggttctggaggtggaggttcc

SEQ ID NO: 51 - protein, 48 aa, Artificial Sequence
  source: /note="Description of Artificial Sequence: Synthetic polypeptide"
QRRKYRSNKGESPVEPAEPCRYSCPREEEGSTIPIQEDYRKPEPACSP

SEQ ID NO: 52 - DNA, 123 bp, Artificial Sequence
  source: /note="Description of Artificial Sequence: Synthetic polynucleotide"
aggagtaagaggagcaggctcctgcacagtgactacatgaacatgactccccgccgccccgggcccacccgcaagcattaccagccctatgccccaccacgcgacttcgcagcctatcgctcc

SEQ ID NO: 53 - protein, 30 aa, Artificial Sequence
  source: /note="Description of Artificial Sequence: Synthetic polypeptide"
  MISC_FEATURE (1)..(30): /note="This sequence may encompass 1-6 'Gly-Gly-Gly-Gly-Ser' repeating units"
GGGGSGGGGSGGGGSGGGGSGGGGSGGGGS

SEQ ID NO: 54 - DNA, 63 bp, Artificial Sequence
  source: /note="Description of Artificial Sequence: Synthetic oligonucleotide"
atggccctgcctgtgacagccctgctgctgcctctggctctgctgctgcatgccgctagaccc

SEQ ID NO: 55 - DNA, 135 bp, Artificial Sequence
  source: /note="Description of Artificial Sequence: Synthetic polynucleotide"
accacgacgccagcgccgcgaccaccaacaccggcgcccaccatcgcgtcgcagcccctgtccctgcgcccagaggcgtgccggccagcggcggggggcgcagtgcacacgagggggctggacttcgcctgtgat

SEQ ID NO: 56 - DNA, 72 bp, Artificial Sequence
  source: /note="Description of Artificial Sequence: Synthetic oligonucleotide"
atctacatctgggcgcccttggccgggacttgtggggtccttctcctgtcactggttatcaccctttactgc

SEQ ID NO: 57 - skipped

SEQ ID NO: 58 - protein, 486 aa, Artificial Sequence
  source: /note="Description of Artificial Sequence: Synthetic polypeptide"
MALPVTALLLPLALLLHAARPDIQMTQTTSSLSASLGDRVTISCRASQDISKYLNWYQQKPDGTVKLLIYHTSRLHSGVPSRFSGSGSGTDYSLTISNLEQEDIATYFCQQGNTLPYTFGGGTKLEITGGGGSGGGGSGGGGSEVKLQESGPGLVAPSQSLSVTCTVSGVSLPDYGVSWIRQPPRKGLEWLGVIWGSETTYYNSALKSRLTIIKDNSKSQVFLKMNSLQTDDTAIYYCAKHYYYGGSYAMDYWGQGTSVTVSSTTTPAPRPPTPAPTIASQPLSLRPEACRPAAGGAVHTRGLDFACDIYIWAPLAGTCGVLLLSLVITLYCKRGRKKLLYIFKQPFMRPVQTTQEEDGCSCRFPEEEEGGCELRVKFSRSADAPAYKQGQNQLYNELNLGRREEYDVLDKRRGRDPEMGGKPRRKNPQEGLYNELQKDKMAEAYSEIGMKGERRRGKGHDGLYQGLSTATKDTYDALHMQALPPR

SEQ ID NO: 59 - protein, 242 aa, Artificial Sequence
  source: /note="Description of Artificial Sequence: Synthetic polypeptide"
DIQMTQTTSSLSASLGDRVTISCRASQDISKYLNWYQQKPDGTVKLLIYHTSRLHSGVPSRFSGSGSGTDYSLTISNLEQEDIATYFCQQGNTLPYTFGGGTKLEITGGGGSGGGGSGGGGSEVKLQESGPGLVAPSQSLSVTCTVSGVSLPDYGVSWIRQPPRKGLEWLGVIWGSETTYYNSALKSRLTIIKDNSKSQVFLKMNSLQTDDTAIYYCAKHYYYGGSYAMDYWGQGTSVTVSS

SEQ ID NO: 60 - DNA, 126 bp, Artificial Sequence
  source: /note="Description of Artificial Sequence: Synthetic polynucleotide"
aaacggggcagaaagaaactcctgtatatattcaaacaaccatttatgagaccagtacaaactactcaagaggaagatggctgtagctgccgatttccagaagaagaagaaggaggatgtgaactg

SEQ ID NO: 61 - DNA, 813 bp, Artificial Sequence
  source: /note="Description of Artificial Sequence: Synthetic polynucleotide"
atggccctccctgtcaccgccctgctgcttccgctggctcttctgctccacgccgctcggcccgaaattgtgatgacccagtcacccgccactcttagcctttcacccggtgagcgcgcaaccctgtcttgcagagcctcccaagacatctcaaaataccttaattggtatcaacagaagcccggacaggctcctcgccttctgatctaccacaccagccggctccattctggaatccctgccaggttcagcggtagcggatctgggaccgactacaccctcactatcagctcactgcagccagaggacttcgctgtctatttctgtcagcaagggaacaccctgccctacacctttggacagggcaccaagctcgagattaaaggtggaggtggcagcggaggaggtgggtccggcggtggaggaagccaggtccaactccaagaaagcggaccgggtcttgtgaagccatcagaaactctttcactgacttgtactgtgagcggagtgtctctccccgattacggggtgtcttggatcagacagccaccggggaagggtctggaatggattggagtgatttggggctctgagactacttactactcttcatccctcaagtcacgcgtcaccatctcaaaggacaactctaagaatcaggtgtcactgaaactgtcatctgtgaccgcagccgacaccgccgtgtactattgcgctaagcattactattatggcgggagctacgcaatggattactggggacagggtactctggtcaccgtgtccagccaccaccatcatcaccatcaccat

SEQ ID NO: 62 - DNA, 813 bp, Artificial Sequence
  source: /note="Description of Artificial Sequence: Synthetic polynucleotide"
atggccctccctgtcaccgccctgctgcttccgctggctcttctgctccacgccgctcggcccgaaattgtgatgacccagtcacccgccactcttagcctttcacccggtgagcgcgcaaccctgtcttgcagagcctcccaagacatctcaaaataccttaattggtatcaacagaagcccggacaggctcctcgccttctgatctaccacaccagccggctccattctggaatccctgccaggttcagcggtagcggatctgggaccgactacaccctcactatcagctcactgcagccagaggacttcgctgtctatttctgtcagcaagggaacaccctgccctacacctttggacagggcaccaagctcgagattaaaggtggaggtggcagcggaggaggtgggtccggcggtggaggaagccaggtccaactccaagaaagcggaccgggtcttgtgaagccatcagaaactctttcactgacttgtactgtgagcggagtgtctctccccgattacggggtgtcttggatcagacagccaccggggaagggtctggaatggattggagtgatttggggctctgagactacttactaccaatcatccctcaagtcacgcgtcaccatctcaaaggacaactctaagaatcaggtgtcactgaaactgtcatctgtgaccgcagccgacaccgccgtgtactattgcgctaagcattactattatggcgggagctacgcaatggattactggggacagggtactctggtcaccgtgtccagccaccaccatcatcaccatcaccat

SEQ ID NO: 63 - DNA, 813 bp, Artificial Sequence
  source: /note="Description of Artificial Sequence: Synthetic polynucleotide"
atggctctgcccgtgaccgcactcctcctgccactggctctgctgcttcacgccgctcgcccacaagtccagcttcaagaatcagggcctggtctggtgaagccatctgagactctgtccctcacttgcaccgtgagcggagtgtccctcccagactacggagtgagctggattagacagcctcccggaaagggactggagtggatcggagtgatttggggtagcgaaaccacttactattcatcttccctgaagtcacgggtcaccatttcaaaggataactcaaagaatcaagtgagcctcaagctctcatcagtcaccgccgctgacaccgccgtgtattactgtgccaagcattactactatggagggtcctacgccatggactactggggccagggaactctggtcactgtgtcatctggtggaggaggtagcggaggaggcgggagcggtggaggtggctccgaaatcgtgatgacccagagccctgcaaccctgtccctttctcccggggaacgggctaccctttcttgtcgggcatcacaagatatctcaaaatacctcaattggtatcaacagaagccgggacaggcccctaggcttcttatctaccacacctctcgcctgcatagcgggattcccgcacgctttagcgggtctggaagcgggaccgactacactctgaccatctcatctctccagcccgaggacttcgccgtctacttctgccagcagggtaacaccctgccgtacaccttcggccagggcaccaagcttgagatcaaacatcaccaccatcatcaccatcac

SEQ ID NO: 64 - DNA, 813 bp, Artificial Sequence
  source: /note="Description of Artificial Sequence: Synthetic polynucleotide"
atggctctgcccgtgaccgcactcctcctgccactggctctgctgcttcacgccgctcgcccacaagtccagcttcaagaatcagggcctggtctggtgaagccatctgagactctgtccctcacttgcaccgtgagcggagtgtccctcccagactacggagtgagctggattagacagcctcccggaaagggactggagtggatcggagtgatttggggtagcgaaaccacttactatcaatcttccctgaagtcacgggtcaccatttcaaaggataactcaaagaatcaagtgagcctcaagctctcatcagtcaccgccgctgacaccgccgtgtattactgtgccaagcattactactatggagggtcctacgccatggactactggggccagggaactctggtcactgtgtcatctggtggaggaggtagcggaggaggcgggagcggtggaggtggctccgaaatcgtgatgacccagagccctgcaaccctgtccctttctcccggggaacgggctaccctttcttgtcgggcatcacaagatatctcaaaatacctcaattggtatcaacagaagccgggacaggcccctaggcttcttatctaccacacctctcgcctgcatagcgggattcccgcacgctttagcgggtctggaagcgggaccgactacactctgaccatctcatctctccagcccgaggacttcgccgtctacttctgccagcagggtaacaccctgccgtacaccttcggccagggcaccaagcttgagatcaaacatcaccaccatcatcaccatcac

SEQ ID NO: 65 - DNA, 828 bp, Artificial Sequence
  source: /note="Description of Artificial Sequence: Synthetic polynucleotide"
atggccctcccagtgaccgctctgctgctgcctctcgcacttcttctccatgccgctcggcctgagatcgtcatgacccaaagccccgctaccctgtccctgtcacccggcgagagggcaaccctttcatgcagggccagccaggacatttctaagtacctcaactggtatcagcagaagccagggcaggctcctcgcctgctgatctaccacaccagccgcctccacagcggtatccccgccagattttccgggagcgggtctggaaccgactacaccctcaccatctcttctctgcagcccgaggatttcgccgtctatttctgccagcaggggaatactctgccgtacaccttcggtcaaggtaccaagctggaaatcaagggaggcggaggatcaggcggtggcggaagcggaggaggtggctccggaggaggaggttcccaagtgcagcttcaagaatcaggacccggacttgtgaagccatcagaaaccctctccctgacttgtaccgtgtccggtgtgagcctccccgactacggagtctcttggattcgccagcctccggggaagggtcttgaatggattggggtgatttggggatcagagactacttactactcttcatcacttaagtcacgggtcaccatcagcaaagataatagcaagaaccaagtgtcacttaagctgtcatctgtgaccgccgctgacaccgccgtgtactattgtgccaaacattactattacggagggtcttatgctatggactactggggacaggggaccctggtgactgtctctagccatcaccatcaccaccatcatcac

SEQ ID NO: 66 - DNA, 828 bp, Artificial Sequence
  source: /note="Description of Artificial Sequence: Synthetic polynucleotide"
atggccctcccagtgaccgctctgctgctgcctctcgcacttcttctccatgccgctcggcctgagatcgtcatgacccaaagccccgctaccctgtccctgtcacccggcgagagggcaaccctttcatgcagggccagccaggacatttctaagtacctcaactggtatcagcagaagccagggcaggctcctcgcctgctgatctaccacaccagccgcctccacagcggtatccccgccagattttccgggagcgggtctggaaccgactacaccctcaccatctcttctctgcagcccgaggatttcgccgtctatttctgccagcaggggaatactctgccgtacaccttcggtcaaggtaccaagctggaaatcaagggaggcggaggatcaggcggtggcggaagcggaggaggtggctccggaggaggaggttcccaagtgcagcttcaagaatcaggacccggacttgtgaagccatcagaaaccctctccctgacttgtaccgtgtccggtgtgagcctccccgactacggagtctcttggattcgccagcctccggggaagggtcttgaatggattggggtgatttggggatcagagactacttactaccagtcatcacttaagtcacgggtcaccatcagcaaagataatagcaagaaccaagtgtcacttaagctgtcatctgtgaccgccgctgacaccgccgtgtactattgtgccaaacattactattacggagggtcttatgctatggactactggggacaggggaccctggtgactgtctctagccatcaccatcaccaccatcatcac

SEQ ID NO: 67 - DNA, 828 bp, Artificial Sequence
  source: /note="Description of Artificial Sequence: Synthetic polynucleotide"
atggcactgcctgtcactgccctcctgctgcctctggccctccttctgcatgccgccaggccccaagtccagctgcaagagtcaggacccggactggtgaagccgtctgagactctctcactgacttgtaccgtcagcggcgtgtccctccccgactacggagtgtcatggatccgccaacctcccgggaaagggcttgaatggattggtgtcatctggggttctgaaaccacctactactcatcttccctgaagtccagggtgaccatcagcaaggataattccaagaaccaggtcagccttaagctgtcatctgtgaccgctgctgacaccgccgtgtattactgcgccaagcactactattacggaggaagctacgctatggactattggggacagggcactctcgtgactgtgagcagcggcggtggagggtctggaggtggaggatccggtggtggtgggtcaggcggaggagggagcgagattgtgatgactcagtcaccagccaccctttctctttcacccggcgagagagcaaccctgagctgtagagccagccaggacatttctaagtacctcaactggtatcagcaaaaaccggggcaggcccctcgcctcctgatctaccatacctcacgccttcactctggtatccccgctcggtttagcggatcaggatctggtaccgactacactctgaccatttccagcctgcagccagaagatttcgcagtgtatttctgccagcagggcaatacccttccttacaccttcggtcagggaaccaagctcgaaatcaagcaccatcaccatcatcaccaccat

SEQ ID NO: 68 - DNA, 828 bp, Artificial Sequence
  source: /note="Description of Artificial Sequence: Synthetic polynucleotide"
atggcactgcctgtcactgccctcctgctgcctctggccctccttctgcatgccgccaggccccaagtccagctgcaagagtcaggacccggactggtgaagccgtctgagactctctcactgacttgtaccgtcagcggcgtgtccctccccgactacggagtgtcatggatccgccaacctcccgggaaagggcttgaatggattggtgtcatctggggttctgaaaccacctactaccagtcttccctgaagtccagggtgaccatcagcaaggataattccaagaaccaggtcagccttaagctgtcatctgtgaccgctgctgacaccgccgtgtattactgcgccaagcactactattacggaggaagctacgctatggactattggggacagggcactctcgtgactgtgagcagcggcggtggagggtctggaggtggaggatccggtggtggtgggtcaggcggaggagggagcgagattgtgatgactcagtcaccagccaccctttctctttcacccggcgagagagcaaccctgagctgtagagccagccaggacatttctaagtacctcaactggtatcagcaaaaaccggggcaggcccctcgcctcctgatctaccatacctcacgccttcactctggtatccccgctcggtttagcggatcaggatctggtaccgactacactctgaccatttccagcctgcagccagaagatttcgcagtgtatttctgccagcagggcaatacccttccttacaccttcggtcagggaaccaagctcgaaatcaagcaccatcaccatcatcatcaccac

SEQ ID NO: 69 - DNA, 828 bp, Artificial Sequence
  source: /note="Description of Artificial Sequence: Synthetic polynucleotide"
atggccctcccagtgaccgctctgctgctgcctctcgcacttcttctccatgccgctcggcctgagatcgtcatgacccaaagccccgctaccctgtccctgtcacccggcgagagggcaaccctttcatgcagggccagccaggacatttctaagtacctcaactggtatcagcagaagccagggcaggctcctcgcctgctgatctaccacaccagccgcctccacagcggtatccccgccagattttccgggagcgggtctggaaccgactacaccctcaccatctcttctctgcagcccgaggatttcgccgtctatttctgccagcaggggaatactctgccgtacaccttcggtcaaggtaccaagctggaaatcaagggaggcggaggatcaggcggtggcggaagcggaggaggtggctccggaggaggaggttcccaagtgcagcttcaagaatcaggacccggacttgtgaagccatcagaaaccctctccctgacttgtaccgtgtccggtgtgagcctccccgactacggagtctcttggattcgccagcctccggggaagggtcttgaatggattggggtgatttggggatcagagactacttactacaattcatcacttaagtcacgggtcaccatcagcaaagataatagcaagaaccaagtgtcacttaagctgtcatctgtgaccgccgctgacaccgccgtgtactattgtgccaaacattactattacggagggtcttatgctatggactactggggacaggggaccctggtgactgtctctagccatcaccatcaccaccatcatcac

SEQ ID NO: 70 - DNA, 828 bp, Artificial Sequence
  source: /note="Description of Artificial Sequence: Synthetic polynucleotide"
atggcactgcctgtcactgccctcctgctgcctctggccctccttctgcatgccgccaggccccaagtccagctgcaagagtcaggacccggactggtgaagccgtctgagactctctcactgacttgtaccgtcagcggcgtgtccctccccgactacggagtgtcatggatccgccaacctcccgggaaagggcttgaatggattggtgtcatctggggttctgaaaccacctactacaactcttccctgaagtccagggtgaccatcagcaaggataattccaagaaccaggtcagccttaagctgtcatctgtgaccgctgctgacaccgccgtgtattactgcgccaagcactactattacggaggaagctacgctatggactattggggacagggcactctcgtgactgtgagcagcggcggtggagggtctggaggtggaggatccggtggtggtgggtcaggcggaggagggagcgagattgtgatgactcagtcaccagccaccctttctctttcacccggcgagagagcaaccctgagctgtagagccagccaggacatttctaagtacctcaactggtatcagcaaaaaccggggcaggcccctcgcctcctgatctaccatacctcacgccttcactctggtatccccgctcggtttagcggatcaggatctggtaccgactacactctgaccatttccagcctgcagccagaagatttcgcagtgtatttctgccagcagggcaatacccttccttacaccttcggtcagggaaccaagctcgaaatcaagcaccatcaccatcatcaccaccat

SEQ ID NO: 71 - DNA, 813 bp, Artificial Sequence
  source: /note="Description of Artificial Sequence: Synthetic polynucleotide"
atggccctccctgtcaccgccctgctgcttccgctggctcttctgctccacgccgctcggcccgaaattgtgatgacccagtcacccgccactcttagcctttcacccggtgagcgcgcaaccctgtcttgcagagcctcccaagacatctcaaaataccttaattggtatcaacagaagcccggacaggctcctcgccttctgatctaccacaccagccggctccattctggaatccctgccaggttcagcggtagcggatctgggaccgactacaccctcactatcagctcactgcagccagaggacttcgctgtctatttctgtcagcaagggaacaccctgccctacacctttggacagggcaccaagctcgagattaaaggtggaggtggcagcggaggaggtgggtccggcggtggaggaagccaggtccaactccaagaaagcggaccgggtcttgtgaagccatcagaaactctttcactgacttgtactgtgagcggagtgtctctccccgattacggggtgtcttggatcagacagccaccggggaagggtctggaatggattggagtgatttggggctctgagactacttactacaattcatccctcaagtcacgcgtcaccatctcaaaggacaactctaagaatcaggtgtcactgaaactgtcatctgtgaccgcagccgacaccgccgtgtactattgcgctaagcattactattatggcgggagctacgcaatggattactggggacagggtactctggtcaccgtgtccagccaccaccatcatcaccatcaccat

SEQ ID NO: 72 - DNA, 813 bp, Artificial Sequence
  source: /note="Description of Artificial Sequence: Synthetic polynucleotide"
atggctctgcccgtgaccgcactcctcctgccactggctctgctgcttcacgccgctcgcccacaagtccagcttcaagaatcagggcctggtctggtgaagccatctgagactctgtccctcacttgcaccgtgagcggagtgtccctcccagactacggagtgagctggattagacagcctcccggaaagggactggagtggatcggagtgatttggggtagcgaaaccacttactataactcttccctgaagtcacgggtcaccatttcaaaggataactcaaagaatcaagtgagcctcaagctctcatcagtcaccgccgctgacaccgccgtgtattactgtgccaagcattactactatggagggtcctacgccatggactactggggccagggaactctggtcactgtgtcatctggtggaggaggtagcggaggaggcgggagcggtggaggtggctccgaaatcgtgatgacccagagccctgcaaccctgtccctttctcccggggaacgggctaccctttcttgtcgggcatcacaagatatctcaaaatacctcaattggtatcaacagaagccgggacaggcccctaggcttcttatctaccacacctctcgcctgcatagcgggattcccgcacgctttagcgggtctggaagcgggaccgactacactctgaccatctcatctctccagcccgaggacttcgccgtctacttctgccagcagggtaacaccctgccgtacaccttcggccagggcaccaagcttgagatcaaacatcaccaccatcatcaccatcac

SEQ ID NO: 73 - protein, 271 aa, Artificial Sequence
  source: /note="Description of Artificial Sequence: Synthetic polypeptide"
MALPVTALLLPLALLLHAARPEIVMTQSPATLSLSPGERATLSCRASQDISKYLNWYQQKPGQAPRLLIYHTSRLHSGIPARFSGSGSGTDYTLTISSLQPEDFAVYFCQQGNTLPYTFGQGTKLEIKGGGGSGGGGSGGGGSQVQLQESGPGLVKPSETLSLTCTVSGVSLPDYGVSWIRQPPGKGLEWIGVIWGSETTYYSSSLKSRVTISKDNSKNQVSLKLSSVTAADTAVYYCAKHYYYGGSYAMDYWGQGTLVTVSSHHHHHHHH

SEQ ID NO: 74 - protein, 271 aa, Artificial Sequence
  source: /note="Description of Artificial Sequence: Synthetic polypeptide"
MALPVTALLLPLALLLHAARPEIVMTQSPATLSLSPGERATLSCRASQDISKYLNWYQQKPGQAPRLLIYHTSRLHSGIPARFSGSGSGTDYTLTISSLQPEDFAVYFCQQGNTLPYTFGQGTKLEIKGGGGSGGGGSGGGGSQVQLQESGPGLVKPSETLSLTCTVSGVSLPDYGVSWIRQPPGKGLEWIGVIWGSETTYYQSSLKSRVTISKDNSKNQVSLKLSSVTAADTAVYYCAKHYYYGGSYAMDYWGQGTLVTVSSHHHHHHHH

SEQ ID NO: 75 - protein, 271 aa, Artificial Sequence
  source: /note="Description of Artificial Sequence: Synthetic polypeptide"
MALPVTALLLPLALLLHAARPQVQLQESGPGLVKPSETLSLTCTVSGVSLPDYGVSWIRQPPGKGLEWIGVIWGSETTYYSSSLKSRVTISKDNSKNQVSLKLSSVTAADTAVYYCAKHYYYGGSYAMDYWGQGTLVTVSSGGGGSGGGGSGGGGSEIVMTQSPATLSLSPGERATLSCRASQDISKYLNWYQQKPGQAPRLLIYHTSRLHSGIPARFSGSGSGTDYTLTISSLQPEDFAVYFCQQGNTLPYTFGQGTKLEIKHHHHHHHH

SEQ ID NO: 76 - protein, 271 aa, Artificial Sequence
  source: /note="Description of Artificial Sequence: Synthetic polypeptide"
MALPVTALLLPLALLLHAARPQVQLQESGPGLVKPSETLSLTCTVSGVSLPDYGVSWIRQPPGKGLEWIGVIWGSETTYYQSSLKSRVTISKDNSKNQVSLKLSSVTAADTAVYYCAKHYYYGGSYAMDYWGQGTLVTVSSGGGGSGGGGSGGGGSEIVMTQSPATLSLSPGERATLSCRASQDISKYLNWYQQKPGQAPRLLIYHTSRLHSGIPARFSGSGSGTDYTLTISSLQPEDFAVYFCQQGNTLPYTFGQGTKLEIKHHHHHHHH

SEQ ID NO: 77 - protein, 276 aa, Artificial Sequence
  source: /note="Description of Artificial Sequence: Synthetic polypeptide"
MALPVTALLLPLALLLHAARPEIVMTQSPATLSLSPGERATLSCRASQDISKYLNWYQQKPGQAPRLLIYHTSRLHSGIPARFSGSGSGTDYTLTISSLQPEDFAVYFCQQGNTLPYTFGQGTKLEIKGGGGSGGGGSGGGGSGGGGSQVQLQESGPGLVKPSETLSLTCTVSGVSLPDYGVSWIRQPPGKGLEWIGVIWGSETTYYSSSLKSRVTISKDNSKNQVSLKLSSVTAADTAVYYCAKHYYYGGSYAMDYWGQGTLVTVSSHHHHHHHH

SEQ ID NO: 78 - protein, 276 aa, Artificial Sequence
  source: /note="Description of Artificial Sequence: Synthetic polypeptide"
MALPVTALLLPLALLLHAARPEIVMTQSPATLSLSPGERATLSCRASQDISKYLNWYQQKPGQAPRLLIYHTSRLHSGIPARFSGSGSGTDYTLTISSLQPEDFAVYFCQQGNTLPYTFGQGTKLEIKGGGGSGGGGSGGGGSGGGGSQVQLQESGPGLVKPSETLSLTCTVSGVSLPDYGVSWIRQPPGKGLEWIGVIWGSETTYYQSSLKSRVTISKDNSKNQVSLKLSSVTAADTAVYYCAKHYYYGGSYAMDYWGQGTLVTVSSHHHHHHHH

SEQ ID NO: 79 - protein, 276 aa, Artificial Sequence
  source: /note="Description of Artificial Sequence: Synthetic polypeptide"
MALPVTALLLPLALLLHAARPQVQLQESGPGLVKPSETLSLTCTVSGVSLPDYGVSWIRQPPGKGLEWIGVIWGSETTYYSSSLKSRVTISKDNSKNQVSLKLSSVTAADTAVYYCAKHYYYGGSYAMDYWGQGTLVTVSSGGGGSGGGGSGGGGSGGGGSEIVMTQSPATLSLSPGERATLSCRASQDISKYLNWYQQKPGQAPRLLIYHTSRLHSGIPARFSGSGSGTDYTLTISSLQPEDFAVYFCQQGNTLPYTFGQGTKLEIKHHHHHHHH

SEQ ID NO: 80 - protein, 276 aa, Artificial Sequence
  source: /note="Description of Artificial Sequence: Synthetic polypeptide"
MALPVTALLLPLALLLHAARPQVQLQESGPGLVKPSETLSLTCTVSGVSLPDYGVSWIRQPPGKGLEWIGVIWGSETTYYQSSLKSRVTISKDNSKNQVSLKLSSVTAADTAVYYCAKHYYYGGSYAMDYWGQGTLVTVSSGGGGSGGGGSGGGGSGGGGSEIVMTQSPATLSLSPGERATLSCRASQDISKYLNWYQQKPGQAPRLLIYHTSRLHSGIPARFSGSGSGTDYTLTISSLQPEDFAVYFCQQGNTLPYTFGQGTKLEIKHHHHHHHH

SEQ ID NO: 81 - protein, 276 aa, Artificial Sequence
  source: /note="Description of Artificial Sequence: Synthetic polypeptide"
MALPVTALLLPLALLLHAARPEIVMTQSPATLSLSPGERATLSCRASQDISKYLNWYQQKPGQAPRLLIYHTSRLHSGIPARFSGSGSGTDYTLTISSLQPEDFAVYFCQQGNTLPYTFGQGTKLEIKGGGGSGGGGSGGGGSGGGGSQVQLQESGPGLVKPSETLSLTCTVSGVSLPDYGVSWIRQPPGKGLEWIGVIWGSETTYYNSSLKSRVTISKDNSKNQVSLKLSSVTAADTAVYYCAKHYYYGGSYAMDYWGQGTLVTVSSHHHHHHHH

SEQ ID NO: 82 - protein, 276 aa, Artificial Sequence
  source: /note="Description of Artificial Sequence: Synthetic polypeptide"
MALPVTALLLPLALLLHAARPQVQLQESGPGLVKPSETLSLTCTVSGVSLPDYGVSWIRQPPGKGLEWIGVIWGSETTYYNSSLKSRVTISKDNSKNQVSLKLSSVTAADTAVYYCAKHYYYGGSYAMDYWGQGTLVTVSSGGGGSGGGGSGGGGSGGGGSEIVMTQSPATLSLSPGERATLSCRASQDISKYLNWYQQKPGQAPRLLIYHTSRLHSGIPARFSGSGSGTDYTLTISSLQPEDFAVYFCQQGNTLPYTFGQGTKLEIKHHHHHHHH

SEQ ID NO: 83 - protein, 271 aa, Artificial Sequence
  source: /note="Description of Artificial Sequence: Synthetic polypeptide"
MALPVTALLLPLALLLHAARPEIVMTQSPATLSLSPGERATLSCRASQDISKYLNWYQQKPGQAPRLLIYHTSRLHSGIPARFSGSGSGTDYTLTISSLQPEDFAVYFCQQGNTLPYTFGQGTKLEIKGGGGSGGGGSGGGGSQVQLQESGPGLVKPSETLSLTCTVSGVSLPDYGVSWIRQPPGKGLEWIGVIWGSETTYYNSSLKSRVTISKDNSKNQVSLKLSSVTAADTAVYYCAKHYYYGGSYAMDYWGQGTLVTVSSHHHHHHHH

SEQ ID NO: 84 - protein, 271 aa, Artificial Sequence
  source: /note="Description of Artificial Sequence: Synthetic polypeptide"
MALPVTALLLPLALLLHAARPQVQLQESGPGLVKPSETLSLTCTVSGVSLPDYGVSWIRQPPGKGLEWIGVIWGSETTYYNSSLKSRVTISKDNSKNQVSLKLSSVTAADTAVYYCAKHYYYGGSYAMDYWGQGTLVTVSSGGGGSGGGGSGGGGSEIVMTQSPATLSLSPGERATLSCRASQDISKYLNWYQQKPGQAPRLLIYHTSRLHSGIPARFSGSGSGTDYTLTISSLQPEDFAVYFCQQGNTLPYTFGQGTKLEIKHHHHHHHH

SEQ ID NO: 85 - DNA, 1458 bp, Artificial Sequence
  source: /note="Description of Artificial Sequence: Synthetic polynucleotide"
atggccctccctgtcaccgccctgctgcttccgctggctcttctgctccacgccgctcggcccgaaattgtgatgacccagtcacccgccactcttagcctttcacccggtgagcgcgcaaccctgtcttgcagagcctcccaagacatctcaaaataccttaattggtatcaacagaagcccggacaggctcctcgccttctgatctaccacaccagccggctccattctggaatccctgccaggttcagcggtagcggatctgggaccgactacaccctcactatcagctcactgcagccagaggacttcgctgtctatttctgtcagcaagggaacaccctgccctacacctttggacagggcaccaagctcgagattaaaggtggaggtggcagcggaggaggtgggtccggcggtggaggaagccaggtccaactccaagaaagcggaccgggtcttgtgaagccatcagaaactctttcactgacttgtactgtgagcggagtgtctctccccgattacggggtgtcttggatcagacagccaccggggaagggtctggaatggattggagtgatttggggctctgagactacttactactcttcatccctcaagtcacgcgtcaccatctcaaaggacaactctaagaatcaggtgtcactgaaactgtcatctgtgaccgcagccgacaccgccgtgtactattgcgctaagcattactattatggcgggagctacgcaatggattactggggacagggtactctggtcaccgtgtccagcaccactaccccagcaccgaggccacccaccccggctcctaccatcgcctcccagcctctgtccctgcgtccggaggcatgtagacccgcagctggtggggccgtgcatacccggggtcttgacttcgcctgcgatatctacatttgggcccctctggctggtacttgcggggtcctgctgctttcactcgtgatcactctttactgtaagcgcggtcggaagaagctgctgtacatctttaagcaacccttcatgaggcctgtgcagactactcaagaggaggacggctgttcatgccggttcccagaggaggaggaaggcggctgcgaactgcgcgtgaaattcagccgcagcgcagatgctccagcctacaagcaggggcagaaccagctctacaacgaactcaatcttggtcggagagaggagtacgacgtgctggacaagcggagaggacgggacccagaaatgggcgggaagccgcgcagaaagaatccccaagagggcctgtacaacgagctccaaaaggataagatggcagaagcctatagcgagattggtatgaaaggggaacgcagaagaggcaaaggccacgacggactgtaccagggactcagcaccgccaccaaggacacctatgacgctcttcacatgcaggccctgccgcctcgg

SEQ ID NO: 86 - DNA, 1458 bp, Artificial Sequence
  source: /note="Description of Artificial Sequence: Synthetic polynucleotide"
atggccctccctgtcaccgccctgctgcttccgctggctcttctgctccacgccgctcggcccgaaattgtgatgacccagtcacccgccactcttagcctttcacccggtgagcgcgcaaccctgtcttgcagagcctcccaagacatctcaaaataccttaattggtatcaacagaagcccggacaggctcctcgccttctgatctaccacaccagccggctccattctggaatccctgccaggttcagcggtagcggatctgggaccgactacaccctcactatcagctcactgcagccagaggacttcgctgtctatttctgtcagcaagggaacaccctgccctacacctttggacagggcaccaagctcgagattaaaggtggaggtggcagcggaggaggtgggtccggcggtggaggaagccaggtccaactccaagaaagcggaccgggtcttgtgaagccatcagaaactctttcactgacttgtactgtgagcggagtgtctctccccgattacggggtgtcttggatcagacagccaccggggaagggtctggaatggattggagtgatttggggctctgagactacttactaccaatcatccctcaagtcacgcgtcaccatctcaaaggacaactctaagaatcaggtgtcactgaaactgtcatctgtgaccgcagccgacaccgccgtgtactattgcgctaagcattactattatggcgggagctacgcaatggattactggggacagggtactctggtcaccgtgtccagcaccactaccccagcaccgaggccacccaccccggctcctaccatcgcctcccagcctctgtccctgcgtccggaggcatgtagacccgcagctggtggggccgtgcatacccggggtcttgacttcgcctgcgatatctacatttgggcccctctggctggtacttgcggggtcctgctgctttcactcgtgatcactctttactgtaagcgcggtcggaagaagctgctgtacatctttaagcaacccttcatgaggcctgtgcagactactcaagaggaggacggctgttcatgccggttcccagaggaggaggaaggcggctgcgaactgcgcgtgaaattcagccgcagcgcagatgctccagcctacaagcaggggcagaaccagctctacaacgaactcaatcttggtcggagagaggagtacgacgtgctggacaagcggagaggacgggacccagaaatgggcgggaagccgcgcagaaagaatccccaagagggcctgtacaacgagctccaaaaggataagatggcagaagcctatagcgagattggtatgaaaggggaacgcagaagaggcaaaggccacgacggactgtaccagggactcagcaccgccaccaaggacacctatgacgctcttcacatgcaggccctgccgcctcgg

SEQ ID NO: 87 - DNA, 1458 bp, Artificial Sequence
  source: /note="Description of Artificial Sequence: Synthetic polynucleotide"
atggctctgcccgtgaccgcactcctcctgccactggctctgctgcttcacgccgctcgcccacaagtccagcttcaagaatcagggcctggtctggtgaagccatctgagactctgtccctcacttgcaccgtgagcggagtgtccctcccagactacggagtgagctggattagacagcctcccggaaagggactggagtggatcggagtgatttggggtagcgaaaccacttactattcatcttccctgaagtcacgggtcaccatttcaaaggataactcaaagaatcaagtgagcctcaagctctcatcagtcaccgccgctgacaccgccgtgtattactgtgccaagcattactactatggagggtcctacgccatggactactggggccagggaactctggtcactgtgtcatctggtggaggaggtagcggaggaggcgggagcggtggaggtggctccgaaatcgtgatgacccagagccctgcaaccctgtccctttctcccggggaacgggctaccctttcttgtcgggcatcacaagatatctcaaaatacctcaattggtatcaacagaagccgggacaggcccctaggcttcttatctaccacacctctcgcctgcatagcgggattcccgcacgctttagcgggtctggaagcgggaccgactacactctgaccatctcatctctccagcccgaggacttcgccgtctacttctgccagcagggtaacaccctgccgtacaccttcggccagggcaccaagcttgagatcaaaaccactactcccgctccaaggccacccacccctgccccgaccatcgcctctcagccgctttccctgcgtccggaggcatgtagacccgcagctggtggggccgtgcatacccggggtcttgacttcgcctgcgatatctacatttgggcccctctggctggtacttgcggggtcctgctgctttcactcgtgatcactctttactgtaagcgcggtcggaagaagctgctgtacatctttaagcaacccttcatgaggcctgtgcagactactcaagaggaggacggctgttcatgccggttcccagaggaggaggaaggcggctgcgaactgcgcgtgaaattcagccgcagcgcagatgctccagcctacaagcaggggcagaaccagctctacaacgaactcaatcttggtcggagagaggagtacgacgtgctggacaagcggagaggacgggacccagaaatgggcgggaagccgcgcagaaagaatccccaagagggcctgtacaacgagctccaaaaggataagatggcagaagcctatagcgagattggtatgaaaggggaacgcagaagaggcaaaggccacgacggactgtaccagggactcagcaccgccaccaaggacacctatgacgctcttcacatgcaggccctgccgcctcgg

SEQ ID NO: 88 - DNA, 1458 bp, Artificial Sequence
  source: /note="Description of Artificial Sequence: Synthetic polynucleotide"
atggctctgcccgtgaccgcactcctcctgccactggctctgctgcttcacgccgctcgcccacaagtccagcttcaagaatcagggcctggtctggtgaagccatctgagactctgtccctcacttgcaccgtgagcggagtgtccctcccagactacggagtgagctggattagacagcctcccggaaagggactggagtggatcggagtgatttggggtagcgaaaccacttactatcaatcttccctgaagtcacgggtcaccatttcaaaggataactcaaagaatcaagtgagcctcaagctctcatcagtcaccgccgctgacaccgccgtgtattactgtgccaagcattactactatggagggtcctacgccatggactactggggccagggaactctggtcactgtgtcatctggtggaggaggtagcggaggaggcgggagcggtggaggtggctccgaaatcgtgatgacccagagccctgcaaccctgtccctttctcccggggaacgggctaccctttcttgtcgggcatcacaagatatctcaaaatacctcaattggtatcaacagaagccgggacaggcccctaggcttcttatctaccacacctctcgcctgcatagcgggattcccgcacgctttagcgggtctggaagcgggaccgactacactctgaccatctcatctctccagcccgaggacttcgccgtctacttctgccagcagggtaacaccctgccgtacaccttcggccagggcaccaagcttgagatcaaaaccactactcccgctccaaggccacccacccctgccccgaccatcgcctctcagccgctttccctgcgtccggaggcatgtagacccgcagctggtggggccgtgcatacccggggtcttgacttcgcctgcgatatctacatttgggcccctctggctggtacttgcggggtcctgctgctttcactcgtgatcactctttactgtaagcgcggtcggaagaagctgctgtacatctttaagcaacccttcatgaggcctgtgcagactactcaagaggaggacggctgttcatgccggttcccagaggaggaggaaggcggctgcgaactgcgcgtgaaattcagccgcagcgcagatgctccagcctacaagcaggggcagaaccagctctacaacgaactcaatcttggtcggagagaggagtacgacgtgctggacaagcggagaggacgggacccagaaatgggcgggaagccgcgcagaaagaatccccaagagggcctgtacaacgagctccaaaaggataagatggcagaagcctatagcgagattggtatgaaaggggaacgcagaagaggcaaaggccacgacggactgtaccagggactcagcaccgccaccaaggacacctatgacgctcttcacatgcaggccctgccgcctcgg

SEQ ID NO: 89 - DNA, 1473 bp, Artificial Sequence
  source: /note="Description of Artificial Sequence: Synthetic polynucleotide"
atggccctccctgtcaccgccctgctgcttccgctggctcttctgctccacgccgctcggcccgaaattgtgatgacccagtcacccgccactcttagcctttcacccggtgagcgcgcaaccctgtcttgcagagcctcccaagacatctcaaaataccttaattggtatcaacagaagcccggacaggctcctcgccttctgatctaccacaccagccggctccattctggaatccctgccaggttcagcggtagcggatctgggaccgactacaccctcactatcagctcactgcagccagaggacttcgctgtctatttctgtcagcaagggaacaccctgccctacacctttggacagggcaccaagctcgagattaaaggtggaggtggcagcggaggaggtgggtccggcggtggaggaagcggcggaggcgggagccaggtccaactccaagaaagcggaccgggtcttgtgaagccatcagaaactctttcactgacttgtactgtgagcggagtgtctctccccgattacggggtgtcttggatcagacagccaccggggaagggtctggaatggattggagtgatttggggctctgagactacttactactcttcatccctcaagtcacgcgtcaccatctcaaaggacaactctaagaatcaggtgtcactgaaactgtcatctgtgaccgcagccgacaccgccgtgtactattgcgctaagcattactattatggcgggagctacgcaatggattactggggacagggtactctggtcaccgtgtccagcaccactaccccagcaccgaggccacccaccccggctcctaccatcgcctcccagcctctgtccctgcgtccggaggcatgtagacccgcagctggtggggccgtgcatacccggggtcttgacttcgcctgcgatatctacatttgggcccctctggctggtacttgcggggtcctgctgctttcactcgtgatcactctttactgtaagcgcggtcggaagaagctgctgtacatctttaagcaacccttcatgaggcctgtgcagactactcaagaggaggacggctgttcatgccggttcccagaggaggaggaaggcggctgcgaactgcgcgtgaaattcagccgcagcgcagatgctccagcctacaagcaggggcagaaccagctctacaacgaactcaatcttggtcggagagaggagtacgacgtgctggacaagcggagaggacgggacccagaaatgggcgggaagccgcgcagaaagaatccccaagagggcctgtacaacgagctccaaaaggataagatggcagaagcctatagcgagattggtatgaaaggggaacgcagaagaggcaaaggccacgacggactgtaccagggactcagcaccgccaccaaggacacctatgacgctcttcacatgcaggccctgccgcctcgg

SEQ ID NO: 90 - DNA, 1473 bp, Artificial Sequence
  source: /note="Description of Artificial Sequence: Synthetic polynucleotide"
atggccctccctgtcaccgccctgctgcttccgctggctcttctgctccacgccgctcggcccgaaattgtgatgacccagtcacccgccactcttagcctttcacccggtgagcgcgcaaccctgtcttgcagagcctcccaagacatctcaaaataccttaattggtatcaacagaagcccggacaggctcctcgccttctgatctaccacaccagccggctccattctggaatccctgccaggttcagcggtagcggatctgggaccgactacaccctcactatcagctcactgcagccagaggacttcgctgtctatttctgtcagcaagggaacaccctgccctacacctttggacagggcaccaagctcgagattaaaggtggaggtggcagcggaggaggtgggtccggcggtggaggaagcggaggcggagggagccaggtccaactccaagaaagcggaccgggtcttgtgaagccatcagaaactctttcactgacttgtactgtgagcggagtgtctctccccgattacggggtgtcttggatcagacagccaccggggaagggtctggaatggattggagtgatttggggctctgagactacttactaccaatcatccctcaagtcacgcgtcaccatctcaaaggacaactctaagaatcaggtgtcactgaaactgtcatctgtgaccgcagccgacaccgccgtgtactattgcgctaagcattactattatggcgggagctacgcaatggattactggggacagggtactctggtcaccgtgtccagcaccactaccccagcaccgaggccacccaccccggctcctaccatcgcctcccagcctctgtccctgcgtccggaggcatgtagacccgcagctggtggggccgtgcatacccggggtcttgacttcgcctgcgatatctacatttgggcccctctggctggtacttgcggggtcctgctgctttcactcgtgatcactctttactgtaagcgcggtcggaagaagctgctgtacatctttaagcaacccttcatgaggcctgtgcagactactcaagaggaggacggctgttcatgccggttcccagaggaggaggaaggcggctgcgaactgcgcgtgaaattcagccgcagcgcagatgctccagcctacaagcaggggcagaaccagctctacaacgaactcaatcttggtcggagagaggagtacgacgtgctggacaagcggagaggacgggacccagaaatgggcgggaagccgcgcagaaagaatccccaagagggcctgtacaacgagctccaaaaggataagatggcagaagcctatagcgagattggtatgaaaggggaacgcagaagaggcaaaggccacgacggactgtaccagggactcagcaccgccaccaaggacacctatgacgctcttcacatgcaggccctgccgcctcgg

SEQ ID NO: 91 - DNA, 1473 bp, Artificial Sequence
  source: /note="Description of Artificial Sequence: Synthetic polynucleotide"
atggctctgcccgtgaccgcactcctcctgccactggctctgctgcttcacgccgctcgcccacaagtccagcttcaagaatcagggcctggtctggtgaagccatctgagactctgtccctcacttgcaccgtgagcggagtgtccctcccagactacggagtgagctggattagacagcctcccggaaagggactggagtggatcggagtgatttggggtagcgaaaccacttactattcatcttccctgaagtcacgggtcaccatttcaaaggataactcaaagaatcaagtgagcctcaagctctcatcagtcaccgccgctgacaccgccgtgtattactgtgccaagcattactactatggagggtcctacgccatggactactggggccagggaactctggtcactgtgtcatctggtggaggaggtagcggaggaggcgggagcggtggaggtggctccggaggtggcggaagcgaaatcgtgatgacccagagccctgcaaccctgtccctttctcccggggaacgggctaccctttcttgtcgggcatcacaagatatctcaaaatacctcaattggtatcaacagaagccgggacaggcccctaggcttcttatctaccacacctctcgcctgcatagcgggattcccgcacgctttagcgggtctggaagcgggaccgactacactctgaccatctcatctctccagcccgaggacttcgccgtctacttctgccagcagggtaacaccctgccgtacaccttcggccagggcaccaagcttgagatcaaaaccactactcccgctccaaggccacccacccctgccccgaccatcgcctctcagccgctttccctgcgtccggaggcatgtagacccgcagctggtggggccgtgcatacccggggtcttgacttcgcctgcgatatctacatttgggcccctctggctggtacttgcggggtcctgctgctttcactcgtgatcactctttactgtaagcgcggtcggaagaagctgctgtacatctttaagcaacccttcatgaggcctgtgcagactactcaagaggaggacggctgttcatgccggttcccagaggaggaggaaggcggctgcgaactgcgcgtgaaattcagccgcagcgcagatgctccagcctacaagcaggggcagaaccagctctacaacgaactcaatcttggtcggagagaggagtacgacgtgctggacaagcggagaggacgggacccagaaatgggcgggaagccgcgcagaaagaatccccaagagggcctgtacaacgagctccaaaaggataagatggcagaagcctatagcgagattggtatgaaaggggaacgcagaagaggcaaaggccacgacggactgtaccagggactcagcaccgccaccaaggacacctatgacgctcttcacatgcaggccctgccgcctcgg

SEQ ID NO: 92 - DNA, 1473 bp, Artificial Sequence
  source: /note="Description of Artificial Sequence: Synthetic polynucleotide"
atggctctgcccgtgaccgcactcctcctgccactggctctgctgcttcacgccgctcgcccacaagtccagcttcaagaatcagggcctggtctggtgaagccatctgagactctgtccctcacttgcaccgtgagcggagtgtccctcccagactacggagtgagctggattagacagcctcccggaaagggactggagtggatcggagtgatttggggtagcgaaaccacttactatcaatcttccctgaagtcacgggtcaccatttcaaaggataactcaaagaatcaagtgagcctcaagctctcatcagtcaccgccgctgacaccgccgtgtattactgtgccaagcattactactatggagggtcctacgccatggactactggggccagggaactctggtcactgtgtcatctggtggaggaggtagcggaggaggcgggagcggtggaggtggctccggaggcggtgggtcagaaatcgtgatgacccagagccctgcaaccctgtccctttctcccggggaacgggctaccctttcttgtcgggcatcacaagatatctcaaaatacctcaattggtatcaacagaagccgggacaggcccctaggcttcttatctaccacacctctcgcctgcatagcgggattcccgcacgctttagcgggtctggaagcgggaccgactacactctgaccatctcatctctccagcccgaggacttcgccgtctacttctgccagcagggtaacaccctgccgtacaccttcggccagggcaccaagcttgagatcaaaaccactactcccgctccaaggccacccacccctgccccgaccatcgcctctcagccgctttccctgcgtccggaggcatgtagacccgcagctggtggggccgtgcatacccggggtcttgacttcgcctgcgatatctacatttgggcccctctggctggtacttgcggggtcctgctgctttcactcgtgatcactctttactgtaagcgcggtcggaagaagctgctgtacatctttaagcaacccttcatgaggcctgtgcagactactcaagaggaggacggctgttcatgccggttcccagaggaggaggaaggcggctgcgaactgcgcgtgaaattcagccgcagcgcagatgctccagcctacaagcaggggcagaaccagctctacaacgaactcaatcttggtcggagagaggagtacgacgtgctggacaagcggagaggacgggacccagaaatgggcgggaagccgcgcagaaagaatccccaagagggcctgtacaacgagctccaaaaggataagatggcagaagcctatagcgagattggtatgaaaggggaacgcagaagaggcaaaggccacgacggactgtaccagggactcagcaccgccaccaaggacacctatgacgctcttcacatgcaggccctgccgcctcgg

SEQ ID NO: 93 - DNA, 1473 bp, Artificial Sequence
  source: /note="Description of Artificial Sequence: Synthetic polynucleotide"
atggccctccctgtcaccgccctgctgcttccgctggctcttctgctccacgccgctcggcccgaaattgtgatgacccagtcacccgccactcttagcctttcacccggtgagcgcgcaaccctgtcttgcagagcctcccaagacatctcaaaataccttaattggtatcaacagaagcccggacaggctcctcgccttctgatctaccacaccagccggctccattctggaatccctgccaggttcagcggtagcggatctgggaccgactacaccctcactatcagctcactgcagccagaggacttcgctgtctatttctgtcagcaagggaacaccctgccctacacctttggacagggcaccaagctcgagattaaaggtggaggtggcagcggaggaggtgggtccggcggtggaggaagcggaggcggtgggagccaggtccaactccaagaaagcggaccgggtcttgtgaagccatcagaaactctttcactgacttgtactgtgagcggagtgtctctccccgattacggggtgtcttggatcagacagccaccggggaagggtctggaatggattggagtgatttggggctctgagactacttactacaactcatccctcaagtcacgcgtcaccatctcaaaggacaactctaagaatcaggtgtcactgaaactgtcatctgtgaccgcagccgacaccgccgtgtactattgcgctaagcattactattatggcgggagctacgcaatggattactggggacagggtactctggtcaccgtgtccagcaccactaccccagcaccgaggccacccaccccggctcctaccatcgcctcccagcctctgtccctgcgtccggaggcatgtagacccgcagctggtggggccgtgcatacccggggtcttgacttcgcctgcgatatctacatttgggcccctctggctggtacttgcggggtcctgctgctttcactcgtgatcactctttactgtaagcgcggtcggaagaagctgctgtacatctttaagcaacccttcatgaggcctgtgcagactactcaagaggaggacggctgttcatgccggttcccagaggaggaggaaggcggctgcgaactgcgcgtgaaattcagccgcagcgcagatgctccagcctacaagcaggggcagaaccagctctacaacgaactcaatcttggtcggagagaggagtacgacgtgctggacaagcggagaggacgggacccagaaatgggcgggaagccgcgcagaaagaatccccaagagggcctgtacaacgagctccaaaaggataagatggcagaagcctatagcgagattggtatgaaaggggaacgcagaagaggcaaaggccacgacggactgtaccagggactcagcaccgccaccaaggacacctatgacgctcttcacatgcaggccctgccgcctcgg

SEQ ID NO: 94 - DNA, 1473 bp, Artificial Sequence; identical to SEQ ID NO: 93
  source: /note="Description of Artificial Sequence: Synthetic polynucleotide"

SEQ ID NO: 95 - DNA, 1473 bp, Artificial Sequence
  source: /note="Description of Artificial Sequence: Synthetic polynucleotide"
atggctctgcccgtgaccgcactcctcctgccactggctctgctgcttcacgccgctcgcccacaagtccagcttcaagaatcagggcctggtctggtgaagccatctgagactctgtccctcacttgcaccgtgagcggagtgtccctcccagactacggagtgagctggattagacagcctcccggaaagggactggagtggatcggagtgatttggggtagcgaaaccacttactataactcttccctgaagtcacgggtcaccatttcaaaggataactcaaagaatcaagtgagcctcaagctctcatcagtcaccgccgctgacaccgccgtgtattactgtgccaagcattactactatggagggtcctacgccatggactactggggccagggaactctggtcactgtgtcatctggtggaggaggtagcggaggaggcgggagcggtggaggtggctccggaggtggcggaagcgaaatcgtgatgacccagagccctgcaaccctgtccctttctcccggggaacgggctaccctttcttgtcgggcatcacaagatatctcaaaatacctcaattggtatcaacagaagccgggacaggcccctaggcttcttatctaccacacctctcgcctgcatagcgggattcccgcacgctttagcgggtctggaagcgggaccgactacactctgaccatctcatctctccagcccgaggacttcgccgtctacttctgccagcagggtaacaccctgccgtacaccttcggccagggcaccaagcttgagatcaaaaccactactcccgctccaaggccacccacccctgccccgaccatcgcctctcagccgctttccctgcgtccggaggcatgtagacccgcagctggtggggccgtgcatacccggggtcttgacttcgcctgcgatatctacatttgggcccctctggctggtacttgcggggtcctgctgctttcactcgtgatcactctttactgtaagcgcggtcggaagaagctgctgtacatctttaagcaacccttcatgaggcctgtgcagactactcaagaggaggacggctgttcatgccggttcccagaggaggaggaaggcggctgcgaactgcgcgtgaaattcagccgcagcgcagatgctccagcctacaagcaggggcagaaccagctctacaacgaactcaatcttggtcggagagaggagtacgacgtgctggacaagcggagaggacgggacccagaaatgggcgggaagccgcgcagaaagaatccccaagagggcctgtacaacgagctccaaaaggataagatggcagaagcctatagcgagattggtatgaaaggggaacgcagaagaggcaaaggccacgacggactgtaccagggactcagcaccgccaccaaggacacctatgacgctcttcacatgcaggccctgccgcctcgg

SEQ ID NO: 96 - DNA, 1458 bp, Artificial Sequence
  source: /note="Description of Artificial Sequence: Synthetic polynucleotide"
atggccctccctgtcaccgccctgctgcttccgctggctcttctgctccacgccgctcggcccgaaattgtgatgacccagtcacccgccactcttagcctttcacccggtgagcgcgcaaccctgtcttgcagagcctcccaagacatctcaaaataccttaattggtatcaacagaagcccggacaggctcctcgccttctgatctaccacaccagccggctccattctggaatccctgccaggttcagcggtagcggatctgggaccgactacaccctcactatcagctcactgcagccagaggacttcgctgtctatttctgtcagcaagggaacaccctgccctacacctttggacagggcaccaagctcgagattaaaggtggaggtggcagcggaggaggtgggtccggcggtggaggaagccaggtccaactccaagaaagcggaccgggtcttgtgaagccatcagaaactctttcactgacttgtactgtgagcggagtgtctctccccgattacggggtgtcttggatcagacagccaccggggaagggtctggaatggattggagtgatttggggctctgagactacttactacaactcatccctcaagtcacgcgtcaccatctcaaaggacaactctaagaatcaggtgtcactgaaactgtcatctgtgaccgcagccgacaccgccgtgtactattgcgctaagcattactattatggcgggagctacgcaatggattactggggacagggtactctggtcaccgtgtccagcaccactaccccagcaccgaggccacccaccccggctcctaccatcgcctcccagcctctgtccctgcgtccggaggcatgtagacccgcagctggtggggccgtgcatacccggggtcttgacttcgcctgcgatatctacatttgggcccctctggctggtacttgcggggtcctgctgctttcactcgtgatcactctttactgtaagcgcggtcggaagaagctgctgtacatctttaagcaacccttcatgaggcctgtgcagactactcaagaggaggacggctgttcatgccggttcccagaggaggaggaaggcggctgcgaactgcgcgtgaaattcagccgcagcgcagatgctccagcctacaagcaggggcagaaccagctctacaacgaactcaatcttggtcggagagaggagtacgacgtgctggacaagcggagaggacgggacccagaaatgggcgggaagccgcgcagaaagaatccccaagagggcctgtacaacgagctccaaaaggataagatggcagaagcctatagcgagattggtatgaaaggggaacgcagaagaggcaaaggccacgacggactgtaccagggactcagcaccgccaccaaggacacctatgacgctcttcacatgcaggccctgccgcctcgg

SEQ ID NO: 97 - DNA, 813 bp, Artificial Sequence
  source: /note="Description of Artificial Sequence: Synthetic polynucleotide"
atggccctgcccgtcaccgctctgctgctgccccttgctctgcttcttcatgcagcaaggccggacatccagatgacccaaaccacctcatccctctctgcctctcttggagacagggtgaccatttcttgtcgcgccagccaggacatcagcaagtatctgaactggtatcagcagaagccggacggaaccgtgaagctcctgatctaccatacctctcgcctgcatagcggcgtgccctcacgcttctctggaagcggatcaggaaccgattattctctcactatttcaaatcttgagcaggaagatattgccacctatttctgccagcagggtaataccctgccctacaccttcggaggagggaccaagctcgaaatcaccggtggaggaggcagcggcggtggagggtctggtggaggtggttctgaggtgaagctgcaagaatcaggccctggacttgtggccccttcacagtccctgagcgtgacttgcaccgtgtccggagtctccctgcccgactacggagtgtcatggatcagacaacctccacggaaaggactggaatggctcggtgtcatctggggtagcgaaactacttactacaattcagccctcaaaagcaggctgactattatcaaggacaacagcaagtcccaagtctttcttaagatgaactcactccagactgacgacaccgcaatctactattgtgctaagcactactactacggaggatcctacgctatggattactggggacaaggtacttccgtcactgtctcttcacaccatcatcaccatcaccatcac

SEQ ID NO: 98 - protein, 271 aa, Artificial Sequence
  source: /note="Description of Artificial Sequence: Synthetic polypeptide"
MALPVTALLLPLALLLHAARPDIQMTQTTSSLSASLGDRVTISCRASQDISKYLNWYQQKPDGTVKLLIYHTSRLHSGVPSRFSGSGSGTDYSLTISNLEQEDIATYFCQQGNTLPYTFGGGTKLEITGGGGSGGGGSGGGGSEVKLQESGPGLVAPSQSLSVTCTVSGVSLPDYGVSWIRQPPRKGLEWLGVIWGSETTYYNSALKSRLTIIKDNSKSQVFLKMNSLQTDDTAIYYCAKHYYYGGSYAMDYWGQGTSVTVSSHHHHHHHH

SEQ ID NO: 99 - DNA, 1458 bp, Artificial Sequence
  source: /note="Description of Artificial Sequence: Synthetic polynucleotide"
atggccttaccagtgaccgccttgctcctgccgctggccttgctgctccacgccgccaggccggacatccagatgacacagactacatcctccctgtctgcctctctgggagacagagtcaccatcagttgcagggcaagtcaggacattagtaaatatttaaattggtatcagcagaaaccagatggaactgttaaactcctgatctaccatacatcaagattacactcaggagtcccatcaaggttcagtggcagtgggtctggaacagattattctctcaccattagcaacctggagcaagaagatattgccacttacttttgccaacagggtaatacgcttccgtacacgttcggaggggggaccaagctggagatcacaggtggcggtggctcgggcggtggtgggtcgggtggcggcggatctgaggtgaaactgcaggagtcaggacctggcctggtggcgccctcacagagcctgtccgtcacatgcactgtctcaggggtctcattacccgactatggtgtaagctggattcgccagcctccacgaaagggtctggagtggctgggagtaatatggggtagtgaaaccacatactataattcagctctcaaatccagactgaccatcatcaaggacaactccaagagccaagttttcttaaaaatgaacagtctgcaaactgatgacacagccatttactactgtgccaaacattattactacggtggtagctatgctatggactactggggccaaggaacctcagtcaccgtctcctcaaccacgacgccagcgccgcgaccaccaacaccggcgcccaccatcgcgtcgcagcccctgtccctgcgcccagaggcgtgccggccagcggcggggggcgcagtgcacacgagggggctggacttcgcctgtgatatctacatctgggcgcccttggccgggacttgtggggtccttctcctgtcactggttatcaccctttactgcaaacggggcagaaagaaactcctgtatatattcaaacaaccatttatgagaccagtacaaactactcaagaggaagatggctgtagctgccgatttccagaagaagaagaaggaggatgtgaactgagagtgaagttcagcaggagcgcagacgcccccgcgtacaagcagggccagaaccagctctataacgagctcaatctaggacgaagagaggagtacgatgttttggacaagagacgtggccgggaccctgagatggggggaaagccgagaaggaagaaccctcaggaaggcctgtacaatgaactgcagaaagataagatggcggaggcctacagtgagattgggatgaaaggcgagcgccggaggggcaaggggcacgatggcctttaccagggtctcagtacagccaccaaggacacctacgacgcccttcacatgcaggccctgccccctcgc

SEQ ID NO: 100 - DNA, 1184 bp, Artificial Sequence
  source: /note="Description of Artificial Sequence: Synthetic polynucleotide"
cgtgaggctccggtgcccgtcagtgggcagagcgcacatcgcccacagtccccgagaagttggggggaggggtcggcaattgaaccggtgcctagagaaggtggcgcggggtaaactgggaaagtgatgtcgtgtactggctccgcctttttcccgagggtgggggagaaccgtatataagtgcagtagtcgccgtgaacgttctttttcgcaacgggtttgccgccagaacacaggtaagtgccgtgtgtggttcccgcgggcctggcctctttacgggttatggcccttgcgtgccttgaattacttccacctggctgcagtacgtgattcttgatcccgagcttcgggttggaagtgggtgggagagttcgaggccttgcgcttaaggagccccttcgcctcgtgcttgagttgaggcctggcctgggcgctggggccgccgcgtgcgaatctggtggcaccttcgcgcctgtctcgctgctttcgataagtctctagccatttaaaatttttgatgacctgctgcgacgctttttttctggcaagatagtcttgtaaatgcgggccaagatctgcacactggtatttcggtttttggggccgcgggcggcgacggggcccgtgcgtcccagcgcacatgttcggcgaggcggggcctgcgagcgcggccaccgagaatcggacgggggtagtctcaagctggccggcctgctctggtgcctggcctcgcgccgccgtgtatcgccccgccctgggcggcaaggctggcccggtcggcaccagttgcgtgagcggaaagatggccgcttcccggccctgctgcagggagctcaaaatggaggacgcggcgctcgggagagcgggcgggtgagtcacccacacaaaggaaaagggcctttccgtcctcagccgtcgcttcatgtgactccacggagtaccgggcgccgtccaggcacctcgattagttctcgagcttttggagtacgtcgtctttaggttggggggaggggttttatgcgatggagtttccccacactgagtgggtggagactgaagttaggccagcttggcacttgatgtaattctccttggaatttgccctttttgagtttggatcttggttcattctcaagcctcagacagtggttcaaagtttttttcttccatttcaggtgtcgtga

SEQ ID NO: 101 - DNA, 336 bp, Artificial Sequence
  source: /note="Description of Artificial Sequence: Synthetic polynucleotide"
agagtgaagttcagcaggagcgcagacgcccccgcgtacaagcagggccagaaccagctctataacgagctcaatctaggacgaagagaggagtacgatgttttggacaagagacgtggccgggaccctgagatggggggaaagccgagaaggaagaaccctcaggaaggcctgtacaatgaactgcagaaagataagatggcggaggcctacagtgagattgggatgaaaggcgagcgccggaggggcaaggggcacgatggcctttaccagggtctcagtacagccaccaaggacacctacgacgcccttcacatgcaggccctgccccctcgc

SEQ ID NO: 102 - protein, 230 aa, Artificial Sequence; identical to SEQ ID NO: 45
  source: /note="Description of Artificial Sequence: Synthetic polypeptide"

SEQ ID NO: 103 - DNA, 690 bp, Artificial Sequence; identical to SEQ ID NO: 46
  source: /note="Description of Artificial Sequence: Synthetic polynucleotide"

SEQ ID NO: 104 - skipped

SEQ ID NO: 105 - protein, 40 aa, Artificial Sequence
  source: /note="Description of Artificial Sequence: Synthetic polypeptide"
  MISC_FEATURE (1)..(40): /note="This sequence may encompass 1-10 'Gly-Gly-Gly-Ser' repeating units"
GGGSGGGSGGGSGGGSGGGSGGGSGGGSGGGSGGGSGGGS

SEQ ID NO: 106 - protein, 20 aa, Artificial Sequence
  source: /note="Description of Artificial Sequence: Synthetic peptide"
GGGGSGGGGSGGGGSGGGGS

SEQ ID NO: 107 - protein, 15 aa, Artificial Sequence
  source: /note="Description of Artificial Sequence: Synthetic peptide"
GGGGSGGGGSGGGGS

SEQ ID NO: 108 - protein, 4 aa, Artificial Sequence
  source: /note="Description of Artificial Sequence: Synthetic peptide"
GGGS

SEQ ID NO: 109 - protein, 244 aa, Artificial Sequence
  source: /note="Description of Artificial Sequence: Synthetic polypeptide"
QVQLLESGAELVRPGSSVKISCKASGYAFSSYWMNWVKQRPGQGLEWIGQIYPGDGDTNYNGKFKGQATLTADKSSSTAYMQLSGLTSEDSAVYSCARKTISSVVDFYFDYWGQGTTVTGGGSGGGSGGGSGGGSELVLTQSPKFMSTSVGDRVSVTCKASQNVGTNVAWYQQKPGQSPKPLIYSATYRNSGVPDRFTGSGSGTDFTLTITNVQSKDLADYFCQYNRYPYTSFFFTKLEIKRRS

SEQ ID NO: 110 - protein, 464 aa, Artificial Sequence
  source: /note="Description of Artificial Sequence: Synthetic polypeptide"
QVQLLESGAELVRPGSSVKISCKASGYAFSSYWMNWVKQRPGQGLEWIGQIYPGDGDTNYNGKFKGQATLTADKSSSTAYMQLSGLTSEDSAVYSCARKTISSVVDFYFDYWGQGTTVTGGGSGGGSGGGSGGGSELVLTQSPKFMSTSVGDRVSVTCKASQNVGTNVAWYQQKPGQSPKPLIYSATYRNSGVPDRFTGSGSGTDFTLTITNVQSKDLADYFCQYNRYPYTSFFFTKLEIKRRSKIEVMYPPPYLDNEKSNGTIIHVKGKHLCPSPLFPGPSKPFWVLVVVGGVLACYSLLVTVAFIIFWVRSKRSRLLHSDYMNMTPRRPGPTRKHYQPYAPPRDFAAYRSRVKFSRSADAPAYQQGQNQLYNELNLGRREEYDVLDKRRGRDPEMGGKPRRKNPQEGLYNELQKDKMAEAYSEIGMKGERRRGKGHDGLYQGLSTATKDTYDALHMQALPPR

SEQ ID NO: 111 - protein, 246 aa, Artificial Sequence
  source: /note="Description of Artificial Sequence: Synthetic polypeptide"
DIQMTQTTSSLSASLGDRVTISCRASQDISKYLNWYQQKPDGTVKLLIYHTSRLHSGVPSRFSGSGSGTDYSLTISNLEQEDIATYFCQQGNTLPYTFGGGTKLEITGSTSGSGKPGSGEGSTKGEVKLQESGPGLVAPSQSLSVTCTVSGVSLPDYGVSWIRQPPRKGLEWLGVIWGSETTYYNSALKSRLTIIKDNSKSQVFLKMNSLQTDDTAIYYCAKHYYYGGSYAMDYWGQGTSVTVSSE

SEQ ID NO: 112 - protein, 439 aa, Artificial Sequence
  source: /note="Description of Artificial Sequence: Synthetic polypeptide"
DIQMTQTTSSLSASLGDRVTISCRASQDISKYLNWYQQKPDGTVKLLIYHTSRLHSGVPSRFSGSGSGTDYSLTISNLEQEDIATYFCQQGNTLPYTFGGGTKLEITGSTSGSGKPGSGEGSTKGEVKLQESGPGLVAPSQSLSVTCTVSGVSLPDYGVSWIRQPPRKGLEWLGVIWGSETTYYNSALKSRLTIIKDNSKSQVFLKMNSLQTDDTAIYYCAKHYYYGGSYAMDYWGQGTSVTVSSESKYGPPCPPCPMFWVLVVVGGVLACYSLLVTVAFIIFWVKRGRKKLLYIFKQPFMRPVQTTQEEDGCSCRFEEEEGGCELRVKFSRSADAPAYQQGQNQLYNELNLGRREEYDVLDKRRGRDPEMGGKPRRKNPQEGLYNELQKDKMAEAYSEIGMKGERRRGKGHDGLYQGLSTATKDTYDALHMQALPPRL

SEQ ID NO: 113 - protein, 819 aa, Artificial Sequence
  source: /note="Description of Artificial Sequence: Synthetic polypeptide"
DIQMTQTTSSLSASLGDRVTISCRASQDISKYLNWYQQKPDGTVKLLIYHTSRLHSGVPSRFSGSGSGTDYSLTISNLEQEDIATYFCQQGNTLPYTFGGGTKLEITGSTSGSGKPGSGEGSTKGEVKLQESGPGLVAPSQSLSVTCTVSGVSLPDYGVSWIRQPPRKGLEWLGVIWGSETTYYNSALKSRLTIIKDNSKSQVFLKMNSLQTDDTAIYYCAKHYYYGGSYAMDYWGQGTSVTVSSESKYGPPCPPCPMFWVLVVVGGVLACYSLLVTVAFIIFWVKRGRKKLLYIFKQPFMRPVQTTQEEDGCSCRFEEEEGGCELRVKFSRSADAPAYQQGQNQLYNELNLGRREEYDVLDKRRGRDPEMGGKPRRKNPQEGLYNELQKDKMAEAYSEIGMKGERRRGKGHDGLYQGLSTATKDTYDALHMQALPPRLEGGGEGRGSLLTCGDVEENPGPRMLLLVTSLLLCELPHPAFLLIPRKVCNGIGIGEFKDSLSINATNIKHFKNCTSISGDLHILPVAFRGDSFTHTPPLDPQELDILKTVKEITGFLLIQAWPENRTDLHAFENLEIIRGRTKQHGQFSLAVVSLNITSLGLRSLKEISDGDVIISGNKNLCYANTINWKKLFGTSGQKTKIISNRGENSCKATGQVCHALCSPEGCWGPEPRDCVSCRNVSRGRECVDKCNLLEGEPREFVENSECIQCHPECLPQAMNITCTGRGPDNCIQCAHYIDGPHCVKTCPAGVMGENNTLVWKYADAGHVCHLCHPNCTYGCTGPGLEGCPTNGPKIPSIATGMVGALLLLLVVALGIGLFM

SEQ ID NO: 114 - protein, 245 aa, Artificial Sequence
  source: /note="Description of Artificial Sequence: Synthetic polypeptide"
DIQMTQTTSSLSASLGDRVTISCRASQDISKYLNWYQQKPDGTVKLLIYHTSRLHSGVPSRFSGSGSGTDYSLTISNLEQEDIATYFCQQGNTLPYTFGGGTKLEITGSTSGSGKPGSGEGSTKGEVKLQESGPGLVAPSQSLSVTCTVSGVSLPDYGVSWIRQPPRKGLEWLGVIWGSETTYYNSALKSRLTIIKDNSKSQVFLKMNSLQTDDTAIYYCAKHYYYGGSYAMDYWGQGTSVTVSS

SEQ ID NO: 115 - protein, 467 aa, Artificial Sequence
  source: /note="Description of Artificial Sequence: Synthetic polypeptide"
DIQMTQTTSSLSASLGDRVTISCRASQDISKYLNWYQQKPDGTVKLLIYHTSRLHSGVPSRFSGSGSGTDYSLTISNLEQEDIATYFCQQGNTLPYTFGGGTKLEITGSTSGSGKPGSGEGSTKGEVKLQESGPGLVAPSQSLSVTCTVSGVSLPDYGVSWIRQPPRKGLEWLGVIWGSETTYYNSALKSRLTIIKDNSKSQVFLKMNSLQTDDTAIYYCAKHYYYGGSYAMDYWGQGTSVTVSSAAAIEVMYPPPYLDNEKSNGTIIHVKGKHLCPSPLFPGPSKPFWVLVVVGGVLACYSLLVTVAFIIFWVRSKRSRLLHSDYMNMTPRRPGPTRKHYQPYAPPRDFAAYRSRVKFSRSADAPAYQQGQNQLYNELNLGRREEYDVLDKRRGRDPEMGGKPRRKNPQEGLYNELQKDKMAEAYSEIGMKGERRRGKGHDGLYQGLSTATKDTYDALHMQALPPR

SEQ ID NO: 116-117 - skipped (2 entries)

SEQ ID NO: 118 - DNA, 2000 bp, Artificial Sequence
  source: /note="Description of Artificial Sequence: Synthetic polynucleotide"
  misc_feature (1)..(2000): /note="This sequence may encompass 50-2000 nucleotides"
aaaaaaaaaaaaaaaaaaaaaaaaaaaaaaaaaaaaaaaaaaaaaaaaaaaaaaaaaaaaaaaaaaaaaaaaaaaaaaaaaaaaaaaaaaaaaaaaaaaaaaaaaaaaaaaaaaaaaaaaaaaaaaaaaaaaaaaaaaaaaaaaaaaaaaaaaaaaaaaaaaaaaaaaaaaaaaaaaaaaaaaaaaaaaaaaaaaaaaaaaaaaaaaaaaaaaaaaaaaaaaaaaaaaaaaaaaaaaaaaaaaaaaaaaaaaaaaaaaaaaaaaaaaaaaaaaaaaaaaaaaaaaaaaaaaaaaaaaaaaaaaaaaaaaaaaaaaaaaaaaaaaaaaaaaaaaaaaaaaaaaaaaaaaaaaaaaaaaaaaaaaaaaaaaaaaaaaaaaaaaaaaaaaaaaaaaaaaaaaaaaaaaaaaaaaaaaaaaaaaaaaaaaaaaaaaaaaaaaaaaaaaaaaaaaaaaaaaaaaaaaaaaaaaaaaaaaaaaaaaaaaaaaaaaaaaaaaaaaaaaaaaaaaaaaaaaaaaaaaaaaaaaaaaaaaaaaaaaaaaaaaaaaaaaaaaaaaaaaaaaaaaaaaaaaaaaaaaaaaaaaaaaaaaaaaaaaaaaaaaaaaaaaaaaaaaaaaaaaaaaaaaaaaaaaaaaaaaaaaaaaaaaaaaaaaaaaaaaaaaaaaaaaaaaaaaaaaaaaaaaaaaaaaaaaaaaaaaaaaaaaaaaaaaaaaaaaaaaaaaaaaaaaaaaaaaaaaaaaaaaaaaaaaaaaaaaaaaaaaaaaaaaaaaaaaaaaaaaaaaaaaaaaaaaaaaaaaaaaaaaaaaaaaaaaaaaaaaaaaaaaaaaaaaaaaaaaaaaaaaaaaaaaaaaaaaaaaaaaaaaaaaaaaaaaaaaaaaaaaaaaaaaaaaaaaaaaaaaaaaaaaaaaaaaaaaaaaaaaaaaaaaaaaaaaaaaaaaaaaaaaaaaaaaaaaaaaaaaaaaaaaaaaaaaaaaaaaaaaaaaaaaaaaaaaaaaaaaaaaaaaaaaaaaaaaaaaaaaaaaaaaaaaaaaaaaaaaaaaaaaaaaaaaaaaaaaaaaaaaaaaaaaaaaaaaaaaaaaaaaaaaaaaaaaaaaaaaaaaaaaaaaaaaaaaaaaaaaaaaaaaaaaaaaaaaaaaaaaaaaaaaaaaaaaaaaaaaaaaaaaaaaaaaaaaaaaaaaaaaaaaaaaaaaaaaaaaaaaaaaaaaaaaaaaaaaaaaaaaaaaaaaaaaaaaaaaaaaaaaaaaaaaaaaaaaaaaaaaaaaaaaaaaaaaaaaaaaaaaaaaaaaaaaaaaaaaaaaaaaaaaaaaaaaaaaaaaaaaaaaaaaaaaaaaaaaaaaaaaaaaaaaaaaaaaaaaaaaaaaaaaaaaaaaaaaaaaaaaaaaaaaaaaaaaaaaaaaaaaaaaaaaaaaaaaaaaaaaaaaaaaaaaaaaaaaaaaaaaaaaaaaaaaaaaaaaaaaaaaaaaaaaaaaaaaaaaaaaaaaaaaaaaaaaaaaaaaaaaaaaaaaaaaaaaaaaaaaaaaaaaaaaaaaaaaaaaaaaaaaaaaaaaaaaaaaaaaaaaaaaaaaaaaaaaaaaaaaaaaaaaaaaaaaaaaaaaaaaaaaaaaaaaaaaaaaaaaaaaaaaaaaaaaaaaaaaaaaaaaaaaaaaaaaaaaaaaaaaaaaaaaaaaaaaaaaaaaaaaaaaaaaaaaaaaaaaaaaaaaaaaaaaaaaaaaaaaaaaaaaaaaaaaaaaaaaaaaaaaaaaaaaaaaaaaaaaaaaaaaaaaaaaaaaaaaaaaaaaaaaaaaaaaaaaaaaaaaaaaaaaaaaaaaaaaaaaaaaaaaaaaaaaaaaaaaaaaaaaaaaaaaaaaaaaaaaaaaaaaaaaaaaaaaaaaaaaaaaaaaaaaaaaaaaaaaaaaaaaaaaaaaaaaaaaaaaaaaaaaaaaaaaaaaaaaaaaaaaaaaaaaaaaaaaaaaaaaaaaaaaaaaaaaaaaaaaaaaaaaaaaaaaaaaaaaaaaaaaaaaaa

SEQ ID NO: 119 - protein, 373 aa, Artificial Sequence
  source: /note="Description of Artificial Sequence: Synthetic polypeptide"
PGWFLDSPDRPWNPPTFSPALLVVTEGDNATFTCSFSNTSESFVLNWYRMSPSNQTDKLAAFPEDRSQPGQDCRFRVTQLPNGRDFHMSVVRARRNDSGTYLCGAISLAPKAQIKESLRAELRVTERRAEVPTAHPSPSPRPAGQFQTLVTTTPAPRPPTPAPTIASQPLSLRPEACRPAAGGAVHTRGLDFACDIYIWAPLAGTCGVLLLSLVITLYCKRGRKKLLYIFKQPFMRPVQTTQEEDGCSCRFPEEEEGGCELRVKFSRSADAPAYKQGQNQLYNELNLGRREEYDVLDKRRGRDPEMGGKPRRKNPQEGLYNELQKDKMAEAYSEIGMKGERRRGKGHDGLYQGLSTATKDTYDALHMQALPPR

SEQ ID NO: 120 - DNA, 1182 bp, Artificial Sequence
  source: /note="Description of Artificial Sequence: Synthetic polynucleotide"
atggccctccctgtcactgccctgcttctccccctcgcactcctgctccacgccgctagaccacccggatggtttctggactctccggatcgcccgtggaatcccccaaccttctcaccggcactcttggttgtgactgagggcgataatgcgaccttcacgtgctcgttctccaacacctccgaatcattcgtgctgaactggtaccgcatgagcccgtcaaaccagaccgacaagctcgccgcgtttccggaagatcggtcgcaaccgggacaggattgtcggttccgcgtgactcaactgccgaatggcagagacttccacatgagcgtggtccgcgctaggcgaaacgactccgggacctacctgtgcggagccatctcgctggcgcctaaggcccaaatcaaagagagcttgagggccgaactgagagtgaccgagcgcagagctgaggtgccaactgcacatccatccccatcgcctcggcctgcggggcagtttcagaccctggtcacgaccactccggcgccgcgcccaccgactccggccccaactatcgcgagccagcccctgtcgctgaggccggaagcatgccgccctgccgccggaggtgctgtgcatacccggggattggacttcgcatgcgacatctacatttgggctcctctcgccggaacttgtggcgtgctccttctgtccctggtcatcaccctgtactgcaagcggggtcggaaaaagcttctgtacattttcaagcagcccttcatgaggcccgtgcaaaccacccaggaggaggacggttgctcctgccggttccccgaagaggaagaaggaggttgcgagctgcgcgtgaagttctcccggagcgccgacgcccccgcctataagcagggccagaaccagctgtacaacgaactgaacctgggacggcgggaagagtacgatgtgctggacaagcggcgcggccgggaccccgaaatgggcgggaagcctagaagaaagaaccctcaggaaggcctgtataacgagctgcagaaggacaagatggccgaggcctactccgaaattgggatgaagggagagcggcggaggggaaaggggcacgacggcctgtaccaaggactgtccaccgccaccaaggacacatacgatgccctgcacatgcaggcccttccccctcgc

SEQ ID NO: 121 - protein, 394 aa, Artificial Sequence
  source: /note="Description of Artificial Sequence: Synthetic polypeptide"
MALPVTALLLPLALLLHAARPPGWFLDSPDRPWNPPTFSPALLVVTEGDNATFTCSFSNTSESFVLNWYRMSPSNQTDKLAAFPEDRSQPGQDCRFRVTQLPNGRDFHMSVVRARRNDSGTYLCGAISLAPKAQIKESLRAELRVTERRAEVPTAHPSPSPRPAGQFQTLVTTTPAPRPPTPAPTIASQPLSLRPEACRPAAGGAVHTRGLDFACDIYIWAPLAGTCGVLLLSLVITLYCKRGRKKLLYIFKQPFMRPVQTTQEEDGCSCRFPEEEEGGCELRVKFSRSADAPAYKQGQNQLYNELNLGRREEYDVLDKRRGRDPEMGGKPRRKNPQEGLYNELQKDKMAEAYSEIGMKGERRRGKGHDGLYQGLSTATKDTYDALHMQALPPR

SEQ ID NO: 122 - protein, 132 aa, Artificial Sequence
  source: /note="Description of Artificial Sequence: Synthetic polypeptide"
DVPDYASLGGPSSPKKKRKVSRGVQVETISPGDGRTFPKRGQTCVVHYTGMLEDGKKFDSSRDRNKPFKFMLGKQEVIRGWEEGVAQMSVGQRAKLTISPDYAYGATGHPGIIPPHATLVFDVELLKLETSY

SEQ ID NO: 123 - protein, 108 aa, Artificial Sequence
  source: /note="Description of Artificial Sequence: Synthetic polypeptide"
VQVETISPGDGRTFPKRGQTCVVHYTGMLEDGKKFDSSRDRNKPFKFMLGKQEVIRGWEEGVAQMSVGQRAKLTISPDYAYGATGHPGIIPPHATLVFDVELLKLETS

SEQ ID NO: 124 - protein, 93 aa, Artificial Sequence [sequence omitted]

SEQ ID NO: 125 - protein, 95 aa, Artificial Sequence
  source: /note="Description of Artificial Sequence: Synthetic polypeptide"
ILWHEMWHEGLIEASRLYFGERNVKGMFEVLEPLHAMMERGPQTLKETSFNQAYGRDLMEAQEWCRKYMKSGNVKDLTQAWDLYYHVFRRISKTS

SEQ ID NO: 126 - protein, 95 aa, Artificial Sequence
  source: /note="Description of Artificial Sequence: Synthetic polypeptide"
ILWHEMWHEGLLEASRLYFGERNVKGMFEVLEPLHAMMERGPQTLKETSFNQAYGRDLMEAQEWCRKYMKSGNVKDLTQAWDLYYHVFRRISKTS

SEQ ID NO: 127 - protein, 95 aa, Artificial Sequence
  source: /note="Description of Artificial Sequence: Synthetic polypeptide"
ILWHEMWHEGLEEASRLYFGERNVKGMFEVLEPLHAMMERGPQTLKETSFNQAYGRDLMEAQEWCRKYMKSGNVKDLLQAWDLYYHVFRRISKTS

SEQ ID NO: 128 - protein, 95 aa, Artificial Sequence
  source: /note="Description of Artificial Sequence: Synthetic polypeptide"
  MOD_RES (12)..(12): Any amino acid
  MOD_RES (78)..(78): Any amino acid
ILWHEMWHEGLXEASRLYFGERNVKGMFEVLEPLHAMMERGPQTLKETSFNQAYGRDLMEAQEWCRKYMKSGNVKDLXQAWDLYYHVFRRISKTS

SEQ ID NO: 129 - protein, 95 aa, Artificial Sequence
  source: /note="Description of Artificial Sequence: Synthetic polypeptide"
ILWHEMWHEGLIEASRLYFGERNVKGMFEVLEPLHAMMERGPQTLKETSFNQAYGRDLMEAQEWCRKYMKSGNVKDLLQAWDLYYHVFRRISKTS

SEQ ID NO: 130 - protein, 95 aa, Artificial Sequence
  source: /note="Description of Artificial Sequence: Synthetic polypeptide"
ILWHEMWHEGLLEASRLYFGERNVKGMFEVLEPLHAMMERGPQTLKETSFNQAYGRDLMEAQEWCRKYMKSGNVKDLLQAWDLYYHVFRRISKTS

SEQ ID NO: 131-1033 - skipped (903 entries)

SEQ ID NO: 1034 - protein, 7 aa, Artificial Sequence
  source: /note="Description of Artificial Sequence: Synthetic peptide"
AASSLQS

SEQ ID NO: 1035-1311 - skipped (277 entries)

SEQ ID NO: 1312 - DNA, 5 bp, Artificial Sequence
  source: /note="Description of Artificial Sequence: Synthetic oligonucleotide"
ggaaa

SEQ ID NO: 1313 - DNA, 9 bp, Artificial Sequence
  source: /note="Description of Artificial Sequence: Synthetic oligonucleotide"
  modified_base (7)..(7): a, c, t, g, unknown or other
  modified_base (9)..(9): a, c, t, g, unknown or other
wggaaanhn

SEQ ID NO: 1314 - DNA, 6 bp, Artificial Sequence
  source: /note="Description of Artificial Sequence: Synthetic oligonucleotide"
gggact

SEQ ID NO: 1315 - DNA, 120 bp, Artificial Sequence
  source: /note="Description of Artificial Sequence: Synthetic polynucleotide"
agcttggatccaagaggaaaatttgtttcatacagaaggcgttaagaggaaaatttgtttcatacagaaggcgttaagaggaaaatttgtttcatacagaaggcgttcaagcttgtcgac

SEQ ID NO: 1316 - protein, 4 aa, Artificial Sequence
  source: /note="Description of Artificial Sequence: Synthetic peptide"
RGDS

SEQ ID NO: 1317 - protein, 41 aa, Artificial Sequence
  source: /note="Description of Artificial Sequence: Synthetic polypeptide"
RSKRSRLLHSDYMNMTPRRPGPTRKHYQPYAPPRDFAAYRS

SEQ ID NO: 1318 - DNA, 123 bp, Artificial Sequence; identical to SEQ ID NO: 52
  source: /note="Description of Artificial Sequence: Synthetic polynucleotide"

SEQ ID NO: 1319 - protein, 35 aa, Artificial Sequence
  source: /note="Description of Artificial Sequence: Synthetic polypeptide"
TKKKYSSSVHDPNGEYMFMRAVNTAKKSRLTDVTL

SEQ ID NO: 1320 - DNA, 105 bp, Artificial Sequence
  source: /note="Description of Artificial Sequence: Synthetic polynucleotide"
acaaaaaagaagtattcatccagtgtgcacgaccctaacggtgaatacatgttcatgagagcagtgaacacagccaaaaaatccagactcacagatgtgacccta

SEQ ID NO: 1321 - protein, 35 aa, Artificial Sequence
  source: /note="Description of Artificial Sequence: Synthetic polypeptide"
TKKKYSSSVHDPNGEFMFMRAVNTAKKSRLTDVTL

SEQ ID NO: 1322 - skipped

SEQ ID NO: 1323 - DNA, 521 bp, Artificial Sequence
  source: /note="Description of Artificial Sequence: Synthetic polynucleotide"
acccctctctccagccactaagccagttgctccctcggctgacggctgcacgcgaggcctccgaacgtcttacgccttgtggcgcgcccgtccttgtcccgggtgtgatggcggggtgtggggcggagggcgtggcggggaagggccggcgacgagagccgcgcgggacgactcgtcggcgataaccggtgtcgggtagcgccagccgcgcgacggtaacgagggaccgcgacaggcagacgctcccatgatcactctgcacgccgaaggcaaatagtgcaggccgtgcggcgcttggcgttccttggaagggctgaatccccgcctcgtccttcgcagcggccccccgggtgttcccatcgccgcttctaggcccactgcgacgcttgcctgcacttcttacacgctctgggtcccagccgcggcgacgcaaagggccttggtgcgggtctcgtcggcgcagggacgcgtttgggtcccgacggaaccttttccgcgttggggttggggcaccataagct

SEQ ID NO: 1324 - DNA, 118 bp, Artificial Sequence
  source: /note="Description of Artificial Sequence: Synthetic polynucleotide"
acccctctctccagccactaagccagttgctccctcggctgacggctgcacgcgaggcctccgaacgtcttacgccttgtggcgcgcccgtccttgtcccgggtgtgatggcggggtg

SEQ ID NO: 1325 - DNA, 221 bp, Artificial Sequence
  source: /note="Description of Artificial Sequence: Synthetic polynucleotide"
acccctctctccagccactaagccagttgctccctcggctgacggctgcacgcgaggcctccgaacgtcttacgccttgtggcgcgcccgtccttgtcccgggtgtgatggcggggtgtggggcggagggcgtggcggggaagggccggcgacgagagccgcgcgggacgactcgtcggcgataaccggtgtcgggtagcgccagccgcgcgacggtaacg

SEQ ID NO: 1326 - DNA, 324 bp, Artificial Sequence
  source: /note="Description of Artificial Sequence: Synthetic polynucleotide"
acccctctctccagccactaagccagttgctccctcggctgacggctgcacgcgaggcctccgaacgtcttacgccttgtggcgcgcccgtccttgtcccgggtgtgatggcggggtgtggggcggagggcgtggcggggaagggccggcgacgagagccgcgcgggacgactcgtcggcgataaccggtgtcgggtagcgccagccgcgcgacggtaacgagggaccgcgacaggcagacgctcccatgatcactctgcacgccgaaggcaaatagtgcaggccgtgcggcgcttggcgttccttggaagggctgaatccccg

SEQ ID NO: 1327 - DNA, 422 bp, Artificial Sequence
  source: /note="Description of Artificial Sequence: Synthetic polynucleotide"
acccctctctccagccactaagccagttgctccctcggctgacggctgcacgcgaggcctccgaacgtcttacgccttgtggcgcgcccgtccttgtcccgggtgtgatggcggggtgtggggcggagggcgtggcggggaagggccggcgacgagagccgcgcgggacgactcgtcggcgataaccggtgtcgggtagcgccagccgcgcgacggtaacgagggaccgcgacaggcagacgctcccatgatcactctgcacgccgaaggcaaatagtgcaggccgtgcggcgcttggcgttccttggaagggctgaatccccgcctcgtccttcgcagcggccccccgggtgttcccatcgccgcttctaggcccactgcgacgcttgcctgcacttcttacacgctctgggtcccagccg

SEQ ID NO: 1328 - protein, 21 aa, Artificial Sequence
  source: /note="Description of Artificial Sequence: Synthetic peptide"
  VARIANT (1)..(3): /replace=" "
  MISC_FEATURE (1)..(21): /note="Variant residues given in the sequence have no preference with respect to those in the annotations for variant positions"
GSGEGRGSLLTCGDVEENPGP

SEQ ID NO: 1329 - protein, 22 aa, Artificial Sequence
  source: /note="Description of Artificial Sequence: Synthetic peptide"
  VARIANT (1)..(3): /replace=" "
  MISC_FEATURE (1)..(22): /note="Variant residues given in the sequence have no preference with respect to those in the annotations for variant positions"
GSGATNFSLLKQAGDVEENPGP

SEQ ID NO: 1330 - protein, 23 aa, Artificial Sequence
  source: /note="Description of Artificial Sequence: Synthetic peptide"
  VARIANT (1)..(3): /replace=" "
  MISC_FEATURE (1)..(23): /note="Variant residues given in the sequence have no preference with respect to those in the annotations for variant positions"
GSGQCTNYALLKLAGDVESNPGP

SEQ ID NO: 1331 - protein, 25 aa, Artificial Sequence
  source: /note="Description of Artificial Sequence: Synthetic peptide"
  VARIANT (1)..(3): /replace=" "
  MISC_FEATURE (1)..(25): /note="Variant residues given in the sequence have no preference with respect to those in the annotations for variant positions"
GSGVKQTLNFDLLKLAGDVESNPGP

SEQ ID NO: 1332-1399 - skipped (68 entries)

SEQ ID NO: 1400 - protein, 239 aa, Artificial Sequence
  source: /note="Description of Artificial Sequence: Synthetic polypeptide"
EVQLVESGGGLVQPGGSLRLSCAVSGFALSNHGMSWVRRAPGKGLEWVSGIVYSGSTYYAASVKGRFTISRDNSRNTLYLQMNSLRPEDTAIYYCSAHGGESDVWGQGTTVTVSSASGGGGSGGRASGGGGSDIQLTQSPSSLSASVGDRVTITCRASQSISSYLNWYQQKPGKAPKLLIYAASSLQSGVPSRFSGSGSGTDFTLTISSLQPEDFATYYCQQSYSTPYTFGQGTKVEIK

SEQ ID NO: 1401 - DNA, 717 bp, Artificial Sequence
  source: /note="Description of Artificial Sequence: Synthetic polynucleotide"
gaagtgcaattggtggaatcagggggaggacttgtgcagcctggaggatcgctgagactgtcatgtgccgtgtccggctttgccctgtccaaccacgggatgtcctgggtccgccgcgcgcctggaaagggcctcgaatgggtgtcgggtattgtgtacagcggtagcacctactatgccgcatccgtgaaggggagattcaccatcagccgggacaactccaggaacactctgtacctccaaatgaattcgctgaggccagaggacactgccatctactactgctccgcgcatggcggagagtccgacgtctggggacaggggaccaccgtgaccgtgtctagcgcgtccggcggaggcggcagcgggggtcgggcatcagggggcggcggatcggacatccagctcacccagtccccgagctcgctgtccgcctccgtgggagatcgggtcaccatcacgtgccgcgccagccagtcgatttcctcctacctgaactggtaccaacagaagcccggaaaagccccgaagcttctcatctacgccgcctcgagcctgcagtcaggagtgccctcacggttctccggctccggttccggtactgatttcaccctgaccatttcctccctgcaaccggaggacttcgctacttactactgccagcagtcgtactccaccccctacactttcggacaaggcaccaaggtcgaaatcaag

SEQ ID NO: 1402 - protein, 115 aa, Artificial Sequence
  source: /note="Description of Artificial Sequence: Synthetic polypeptide"
EVQLVESGGGLVQPGGSLRLSCAVSGFALSNHGMSWVRRAPGKGLEWVSGIVYSGSTYYAASVKGRFTISRDNSRNTLYLQMNSLRPEDTAIYYCSAHGGESDVWGQGTTVTVSS

SEQ ID NO: 1403 - protein, 107 aa, Artificial Sequence
  source: /note="Description of Artificial Sequence: Synthetic polypeptide"
DIQLTQSPSSLSASVGDRVTITCRASQSISSYLNWYQQKPGKAPKLLIYAASSLQSGVPSRFSGSGSGTDFTLTISSLQPEDFATYYCQQSYSTPYTFGQGTKVEIK

SEQ ID NO: 1404 - protein, 483 aa, Artificial Sequence
  source: /note="Description of Artificial Sequence: Synthetic polypeptide"
MALPVTALLLPLALLLHAARPEVQLVESGGGLVQPGGSLRLSCAVSGFALSNHGMSWVRRAPGKGLEWVSGIVYSGSTYYAASVKGRFTISRDNSRNTLYLQMNSLRPEDTAIYYCSAHGGESDVWGQGTTVTVSSASGGGGSGGRASGGGGSDIQLTQSPSSLSASVGDRVTITCRASQSISSYLNWYQQKPGKAPKLLIYAASSLQSGVPSRFSGSGSGTDFTLTISSLQPEDFATYYCQQSYSTPYTFGQGTKVEIKTTTPAPRPPTPAPTIASQPLSLRPEACRPAAGGAVHTRGLDFACDIYIWAPLAGTCGVLLLSLVITLYCKRGRKKLLYIFKQPFMRPVQTTQEEDGCSCRFPEEEEGGCELRVKFSRSADAPAYKQGQNQLYNELNLGRREEYDVLDKRRGRDPEMGGKPRRKNPQEGLYNELQKDKMAEAYSEIGMKGERRRGKGHDGLYQGLSTATKDTYDALHMQALPPR

SEQ ID NO: 1405 - DNA, 1449 bp, Artificial Sequence
  source: /note="Description of Artificial Sequence: Synthetic polynucleotide"
atggccctccctgtcaccgccctgctgcttccgctggctcttctgctccacgccgctcggcccgaagtgcaattggtggaatcagggggaggacttgtgcagcctggaggatcgctgagactgtcatgtgccgtgtccggctttgccctgtccaaccacgggatgtcctgggtccgccgcgcgcctggaaagggcctcgaatgggtgtcgggtattgtgtacagcggtagcacctactatgccgcatccgtgaaggggagattcaccatcagccgggacaactccaggaacactctgtacctccaaatgaattcgctgaggccagaggacactgccatctactactgctccgcgcatggcggagagtccgacgtctggggacaggggaccaccgtgaccgtgtctagcgcgtccggcggaggcggcagcgggggtcgggcatcagggggcggcggatcggacatccagctcacccagtccccgagctcgctgtccgcctccgtgggagatcgggtcaccatcacgtgccgcgccagccagtcgatttcctcctacctgaactggtaccaacagaagcccggaaaagccccgaagcttctcatctacgccgcctcgagcctgcagtcaggagtgccctcacggttctccggctccggttccggtactgatttcaccctgaccatttcctccctgcaaccggaggacttcgctacttactactgccagcagtcgtactccaccccctacactttcggacaaggcaccaaggtcgaaatcaagaccactaccccagcaccgaggccacccaccccggctcctaccatcgcctcccagcctctgtccctgcgtccggaggcatgtagacccgcagctggtggggccgtgcatacccggggtcttgacttcgcctgcgatatctacatttgggcccctctggctggtacttgcggggtcctgctgctttcactcgtgatcactctttactgtaagcgcggtcggaagaagctgctgtacatctttaagcaacccttcatgaggcctgtgcagactactcaagaggaggacggctgttcatgccggttcccagaggaggaggaaggcggctgcgaactgcgcgtgaaattcagccgcagcgcagatgctccagcctacaagcaggggcagaaccagctctacaacgaactcaatcttggtcggagagaggagtacgacgtgctggacaagcggagaggacgggacccagaaatgggcgggaagccgcgcagaaagaatccccaagagggcctgtacaacgagctccaaaaggataagatggcagaagcctatagcgagattggtatgaaaggggaacgcagaagaggcaaaggccacgacggactgtaccagggactcagcaccgccaccaaggacacctatgacgctcttcacatgcaggccctgccgcctcgg

SEQ ID NO: 1406 - protein, 246 aa, Artificial Sequence
  source: /note="Description of Artificial Sequence: Synthetic polypeptide"
QVQLVESGGGLVQPGRSLRLSCAASGFTFSNYAMSWVRQAPGKGLGWVSGISRSGENTYYADSVKGRFTISRDNSKNTLYLQMNSLRDEDTAVYYCARSPAHYYGGMDVWGQGTTVTVSSASGGGGSGGRASGGGGSDIVLTQSPGTLSLSPGERATLSCRASQSISSSFLAWYQQKPGQAPRLLIYGASRRATGIPDRFSGSGSGTDFTLTISRLEPEDSAVYYCQQYHSSPSWTFGQGTKLEIK

SEQ ID NO: 1407 - DNA, 738 bp, Artificial Sequence
  source: /note="Description of Artificial Sequence: Synthetic polynucleotide"
caagtgcaactcgtggaatctggtggaggactcgtgcaacccggaagatcgcttagactgtcgtgtgccgccagcgggttcactttctcgaactacgcgatgtcctgggtccgccaggcacccggaaagggactcggttgggtgtccggcatttcccggtccggcgaaaatacctactacgccgactccgtgaagggccgcttcaccatctcaagggacaacagcaaaaacaccctgtacttgcaaatgaactccctgcgggatgaagatacagccgtgtactattgcgcccggtcgcctgcccattactacggcggaatggacgtctggggacagggaaccactgtgactgtcagcagcgcgtcgggtggcggcggctcagggggtcgggcctccggggggggagggtccgacatcgtgctgacccagtccccgggaaccctgagcctgagcccgggagagcgcgcgaccctgtcatgccgggcatcccagagcattagctcctcctttctcgcctggtatcagcagaagcccggacaggccccgaggctgctgatctacggcgctagcagaagggctaccggaatcccagaccggttctccggctccggttccgggaccgatttcacccttactatctcgcgcctggaacctgaggactccgccgtctactactgccagcagtaccactcatccccgtcgtggacgttcggacagggcaccaagctggagattaag

SEQ ID NO: 1408 - protein, 120 aa, Artificial Sequence
  source: /note="Description of Artificial Sequence: Synthetic polypeptide"
QVQLVESGGGLVQPGRSLRLSCAASGFTFSNYAMSWVRQAPGKGLGWVSGISRSGENTYYADSVKGRFTISRDNSKNTLYLQMNSLRDEDTAVYYCARSPAHYYGGMDVWGQGTTVTVSS

SEQ ID NO: 1409 - protein, 109 aa, Artificial Sequence
  source: /note="Description of Artificial Sequence: Synthetic polypeptide"
DIVLTQSPGTLSLSPGERATLSCRASQSISSSFLAWYQQKPGQAPRLLIYGASRRATGIPDRFSGSGSGTDFTLTISRLEPEDSAVYYCQQYHSSPSWTFGQGTKLEIK

SEQ ID NO: 1410 - protein, 490 aa, Artificial Sequence
  source: /note="Description of Artificial Sequence: Synthetic polypeptide"
MALPVTALLLPLALLLHAARPQVQLVESGGGLVQPGRSLRLSCAASGFTFSNYAMSWVRQAPGKGLGWVSGISRSGENTYYADSVKGRFTISRDNSKNTLYLQMNSLRDEDTAVYYCARSPAHYYGGMDVWGQGTTVTVSSASGGGGSGGRASGGGGSDIVLTQSPGTLSLSPGERATLSCRASQSISSSFLAWYQQKPGQAPRLLIYGASRRATGIPDRFSGSGSGTDFTLTISRLEPEDSAVYYCQQYHSSPSWTFGQGTKLEIKTTTPAPRPPTPAPTIASQPLSLRPEACRPAAGGAVHTRGLDFACDIYIWAPLAGTCGVLLLSLVITLYCKRGRKKLLYIFKQPFMRPVQTTQEEDGCSCRFPEEEEGGCELRVKFSRSADAPAYKQGQNQLYNELNLGRREEYDVLDKRRGRDPEMGGKPRRKNPQEGLYNELQKDKMAEAYSEIGMKGERRRGKGHDGLYQGLSTATKDTYDALHMQALPPR

SEQ ID NO: 1411 - DNA, 1470 bp, Artificial Sequence
  source: /note="Description of Artificial Sequence: Synthetic polynucleotide"
atggccctccctgtcaccgccctgctgcttccgctggctcttctgctccacgccgctcggccccaagtgcaactcgtggaatctggtggaggactcgtgcaacccggaagatcgcttagactgtcgtgtgccgccagcgggttcactttctcgaactacgcgatgtcctgggtccgccaggcacccggaaagggactcggttgggtgtccggcatttcccggtccggcgaaaatacctactacgccgactccgtgaagggccgcttcaccatctcaagggacaacagcaaaaacaccctgtacttgcaaatgaactccctgcgggatgaagatacagccgtgtactattgcgcccggtcgcctgcccattactacggcggaatggacgtctggggacagggaaccactgtgactgtcagcagcgcgtcgggtggcggcggctcagggggtcgggcctccggggggggagggtccgacatcgtgctgacccagtccccgggaaccctgagcctgagcccgggagagcgcgcgaccctgtcatgccgggcatcccagagcattagctcctcctttctcgcctggtatcagcagaagcccggacaggccccgaggctgctgatctacggcgctagcagaagggctaccggaatcccagaccggttctccggctccggttccgggaccgatttcacccttactatctcgcgcctggaacctgaggactccgccgtctactactgccagcagtaccactcatccccgtcgtggacgttcggacagggcaccaagctggagattaagaccactaccccagcaccgaggccacccaccccggctcctaccatcgcctcccagcctctgtccctgcgtccggaggcatgtagacccgcagctggtggggccgtgcatacccggggtcttgacttcgcctgcgatatctacatttgggcccctctggctggtacttgcggggtcctgctgctttcactcgtgatcactctttactgtaagcgcggtcggaagaagctgctgtacatctttaagcaacccttcatgaggcctgtgcagactactcaagaggaggacggctgttcatgccggttcccagaggaggaggaaggcggctgcgaactgcgcgtgaaattcagccgcagcgcagatgctccagcctacaagcaggggcagaaccagctctacaacgaactcaatcttggtcggagagaggagtacgacgtgctggacaagcggagaggacgggacccagaaatgggcgggaagccgcgcagaaagaatccccaagagggcctgtacaacgagctccaaaaggataagatggcagaagcctatagcgagattggtatgaaaggggaacgcagaagaggcaaaggccacgacggactgtaccagggactcagcaccgccaccaaggacacctatgacgctcttcacatgcaggccctgccgcctcgg

SEQ ID NO: 1412 - protein, 244 aa, Artificial Sequence
  source: /note="Description of Artificial Sequence: Synthetic polypeptide"
QVQLVESGGGLVQPGRSLRLSCAASGFTFDDYAMHWVRQAPGKGLEWVSGISWNSGSIGYADSVKGRFTISRDNAKNSLYLQMNSLRAEDTALYYCSVHSFLAYWGQGTLVTVSSASGGGGSGGRASGGGGSDIVMTQTPLSLPVTPGEPASISCRSSQSLLHSNGYNYLDWYLQKPGQSPQLLIYLGSNRASGVPDRFSGSGSGTDFTLKISRVEAEDVGVYYCMQALQTPYTFGQGTKVEIK

SEQ ID NO: 1413 - DNA, 732 bp, Artificial Sequence
  source: /note="Description of Artificial Sequence: Synthetic polynucleotide"
caagtgcaactcgtcgaatccggtggaggtctggtccaacctggtagaagcctgagactgtcgtgtgcggccagcggattcacctttgatgactatgctatgcactgggtgcggcaggccccaggaaagggcctggaatgggtgtcgggaattagctggaactccgggtccattggctacgccgactccgtgaagggccgcttcaccatctcccgcgacaacgcaaagaactccctgtacttgcaaatgaactcgctcagggctgaggataccgcgctgtactactgctccgtgcattccttcctggcctactggggacagggaactctggtcaccgtgtcgagcgcctccggcggcgggggctcgggtggacgggcctcgggcggaggggggtccgacatcgtgatgacccagaccccgctgagcttgcccgtgactcccggagagcctgcatccatctcctgccggtcatcccagtcccttctccactccaacggatacaactacctcgactggtacctccagaagccgggacagagccctcagcttctgatctacctggggtcaaatagagcctcaggagtgccggatcggttcagcggatctggttcgggaactgatttcactctgaagatttcccgcgtggaagccgaggacgtgggcgtctactactgtatgcaggcgctgcagaccccctataccttcggccaagggacgaaagtggagatcaag

SEQ ID NO: 1414 - protein, 115 aa, Artificial Sequence
  source: /note="Description of Artificial Sequence: Synthetic polypeptide"
QVQLVESGGGLVQPGRSLRLSCAASGFTFDDYAMHWVRQAPGKGLEWVSGISWNSGSIGYADSVKGRFTISRDNAKNSLYLQMNSLRAEDTALYYCSVHSFLAYWGQGTLVTVSS

SEQ ID NO: 1415 - protein, 112 aa, Artificial Sequence
  source: /note="Description of Artificial Sequence: Synthetic polypeptide"
DIVMTQTPLSLPVTPGEPASISCRSSQSLLHSNGYNYLDWYLQKPGQSPQLLIYLGSNRASGVPDRFSGSGSGTDFTLKISRVEAEDVGVYYCMQALQTPYTFGQGTKVEIK

SEQ ID NO: 1416 - protein, 488 aa, Artificial Sequence
  source: /note="Description of Artificial Sequence: Synthetic polypeptide"
MALPVTALLLPLALLLHAARPQVQLVESGGGLVQPGRSLRLSCAASGFTFDDYAMHWVRQAPGKGLEWVSGISWNSGSIGYADSVKGRFTISRDNAKNSLYLQMNSLRAEDTALYYCSVHSFLAYWGQGTLVTVSSASGGGGSGGRASGGGGSDIVMTQTPLSLPVTPGEPASISCRSSQSLLHSNGYNYLDWYLQKPGQSPQLLIYLGSNRASGVPDRFSGSGSGTDFTLKISRVEAEDVGVYYCMQALQTPYTFGQGTKVEIKTTTPAPRPPTPAPTIASQPLSLRPEACRPAAGGAVHTRGLDFACDIYIWAPLAGTCGVLLLSLVITLYCKRGRKKLLYIFKQPFMRPVQTTQEEDGCSCRFPEEEEGGCELRVKFSRSADAPAYKQGQNQLYNELNLGRREEYDVLDKRRGRDPEMGGKPRRKNPQEGLYNELQKDKMAEAYSEIGMKGERRRGKGHDGLYQGLSTATKDTYDALHMQALPPR

SEQ ID NO: 1417 - DNA, 1464 bp, Artificial Sequence
  source: /note="Description of Artificial Sequence: Synthetic polynucleotide"
atggccctccctgtcaccgccctgctgcttccgctggctcttctgctccacgccgctcggccccaagtgcaactcgtcgaatccggtggaggtctggtccaacctggtagaagcctgagactgtcgtgtgcggccagcggattcacctttgatgactatgctatgcactgggtgcggcaggccccaggaaagggcctggaatgggtgtcgggaattagctggaactccgggtccattggctacgccgactccgtgaagggccgcttcaccatctcccgcgacaacgcaaagaactccctgtacttgcaaatgaactcgctcagggctgaggataccgcgctgtactactgctccgtgcattccttcctggcctactggggacagggaactctggtcaccgtgtcgagcgcctccggcggcgggggctcgggtggacgggcctcgggcggaggggggtccgacatcgtgatgacccagaccccgctgagcttgcccgtgactcccggagagcctgcatccatctcctgccggtcatcccagtcccttctccactccaacggatacaactacctcgactggtacctccagaagccgggacagagccctcagcttctgatctacctggggtcaaatagagcctcaggagtgccggatcggttcagcggatctggttcgggaactgatttcactctgaagatttcccgcgtggaagccgaggacgtgggcgtctactactgtatgcaggcgctgcagaccccctataccttcggccaagggacgaaagtggagatcaagaccactaccccagcaccgaggccacccaccccggctcctaccatcgcctcccagcctctgtccctgcgtccggaggcatgtagacccgcagctggtggggccgtgcatacccggggtcttgacttcgcctgcgatatctacatttgggcccctctggctggtacttgcggggtcctgctgctttcactcgtgatcactctttactgtaagcgcggtcggaagaagctgctgtacatctttaagcaacccttcatgaggcctgtgcagactactcaagaggaggacggctgttcatgccggttcccagaggaggaggaaggcggctgcgaactgcgcgtgaaattcagccgcagcgcagatgctccagcctacaagcaggggcagaaccagctctacaacgaactcaatcttggtcggagagaggagtacgacgtgctggacaagcggagaggacgggacccagaaatgggcgggaagccgcgcagaaagaatccccaagagggcctgtacaacgagctccaaaaggataagatggcagaagcctatagcgagattggtatgaaaggggaacgcagaagaggcaaaggccacgacggactgtaccagggactcagcaccgccaccaaggacacctatgacgctcttcacatgcaggccctgccgcctcgg

SEQ ID NO: 1418 - protein, 243 aa, Artificial Sequence
  source: /note="Description of Artificial Sequence: Synthetic polypeptide"
EVQLLESGGGLVQPGGSLRLSCAVSGFALSNHGMSWVRRAPGKGLEWVSGIVYSGSTYYAASVKGRFTISRDNSRNTLYLQMNSLRPEDTAIYYCSAHGGESDVWGQGTTVTVSSASGGGGSGGRASGGGGSDIVMTQTPLSLSVTPGQPASISCKSSQSLLRNDGKTPLYWYLQKAGQPPQLLIYEVSNRFSGVPDRFSGSGSGTDFTLKISRVEAEDVGAYYCMQNIQFPSFGGGTKLEIK

SEQ ID NO: 1419 - DNA, 729 bp, Artificial Sequence
  source: /note="Description of Artificial Sequence: Synthetic polynucleotide"
gaagtgcaattgttggaatctggaggaggacttgtgcagcctggaggatcactgagactttcgtgtgcggtgtcaggcttcgccctgagcaaccacggcatgagctgggtgcggagagccccggggaagggtctggaatgggtgtccgggatcgtctactccggttcaacttactacgccgcaagcgtgaagggtcgcttcaccatttcccgcgataactcccggaacaccctgtacctccaaatgaactccctgcggcccgaggacaccgccatctactactgttccgcgcatggaggagagtccgatgtctggggacagggcactaccgtgaccgtgtcgagcgcctcggggggaggaggctccggcggtcgcgcctccggggggggtggcagcgacattgtgatgacgcagactccactctcgctgtccgtgaccccgggacagcccgcgtccatctcgtgcaagagctcccagagcctgctgaggaacgacggaaagactcctctgtattggtacctccagaaggctggacagcccccgcaactgctcatctacgaagtgtcaaatcgcttctccggggtgccggatcggttttccggctcgggatcgggcaccgacttcaccctgaaaatctccagggtcgaggccgaggacgtgggagcctactactgcatgcaaaacatccagttcccttccttcggcggcggcacaaagctggagattaag

SEQ ID NO: 1420 - protein, 115 aa, Artificial Sequence
  source: /note="Description of Artificial Sequence: Synthetic polypeptide"
EVQLLESGGGLVQPGGSLRLSCAVSGFALSNHGMSWVRRAPGKGLEWVSGIVYSGSTYYAASVKGRFTISRDNSRNTLYLQMNSLRPEDTAIYYCSAHGGESDVWGQGTTVTVSS

SEQ ID NO: 1421 - protein, 111 aa, Artificial Sequence
  source: /note="Description of Artificial Sequence: Synthetic polypeptide"
DIVMTQTPLSLSVTPGQPASISCKSSQSLLRNDGKTPLYWYLQKAGQPPQLLIYEVSNRFSGVPDRFSGSGSGTDFTLKISRVEAEDVGAYYCMQNIQFPSFGGGTKLEIK

SEQ ID NO: 1422 - protein, 487 aa, Artificial Sequence
  source: /note="Description of Artificial Sequence: Synthetic polypeptide"
MALPVTALLLPLALLLHAARPEVQLLESGGGLVQPGGSLRLSCAVSGFALSNHGMSWVRRAPGKGLEWVSGIVYSGSTYYAASVKGRFTISRDNSRNTLYLQMNSLRPEDTAIYYCSAHGGESDVWGQGTTVTVSSASGGGGSGGRASGGGGSDIVMTQTPLSLSVTPGQPASISCKSSQSLLRNDGKTPLYWYLQKAGQPPQLLIYEVSNRFSGVPDRFSGSGSGTDFTLKISRVEAEDVGAYYCMQNIQFPSFGGGTKLEIKTTTPAPRPPTPAPTIASQPLSLRPEACRPAAGGAVHTRGLDFACDIYIWAPLAGTCGVLLLSLVITLYCKRGRKKLLYIFKQPFMRPVQTTQEEDGCSCRFPEEEEGGCELRVKFSRSADAPAYKQGQNQLYNELNLGRREEYDVLDKRRGRDPEMGGKPRRKNPQEGLYNELQKDKMAEAYSEIGMKGERRRGKGHDGLYQGLSTATKDTYDALHMQALPPR

SEQ ID NO: 1423 - DNA, 1461 bp, Artificial Sequence
  source: /note="Description of Artificial Sequence: Synthetic polynucleotide"
atggccctccctgtcaccgccctgctgcttccgctggctcttctgctccacgccgctcggcccgaagtgcaattgttggaatctggaggaggacttgtgcagcctggaggatcactgagactttcgtgtgcggtgtcaggcttcgccctgagcaaccacggcatgagctgggtgcggagagccccggggaagggtctggaatgggtgtccgggatcgtctactccggttcaacttactacgccgcaagcgtgaagggtcgcttcaccatttcccgcgataactcccggaacaccctgtacctccaaatgaactccctgcggcccgaggacaccgccatctactactgttccgcgcatggaggagagtccgatgtctggggacagggcactaccgtgaccgtgtcgagcgcctcggggggaggaggctccggcggtcgcgcctccggggggggtggcagcgacattgtgatgacgcagactccactctcgctgtccgtgaccccgggacagcccgcgtccatctcgtgcaagagctcccagagcctgctgaggaacgacggaaagactcctctgtattggtacctccagaaggctggacagcccccgcaactgctcatctacgaagtgtcaaatcgcttctccggggtgccggatcggttttccggctcgggatcgggcaccgacttcaccctgaaaatctccagggtcgaggccgaggacgtgggagcctactactgcatgcaaaacatccagttcccttccttcggcggcggcacaaagctggagattaagaccactaccccagcaccgaggccacccaccccggctcctaccatcgcctcccagcctctgtccctgcgtccggaggcatgtagacccgcagctggtggggccgtgcatacccggggtcttgacttcgcctgcgatatctacatttgggcccctctggctggtacttgcggggtcctgctgctttcactcgtgatcactctttactgtaagcgcggtcggaagaagctgctgtacatctttaagcaacccttcatgaggcctgtgcagactactcaagaggaggacggctgttcatgccggttcccagaggaggaggaaggcggctgcgaactgcgcgtgaaattcagccgcagcgcagatgctccagcctacaagcaggggcagaaccagctctacaacgaactcaatcttggtcggagagaggagtacgacgtgctggacaagcggagaggacgggacccagaaatgggcgggaagccgcgcagaaagaatccccaagagggcctgtacaacgagctccaaaaggataagatggcagaagcctatagcgagattggtatgaaaggggaacgcagaagaggcaaaggccacgacggactgtaccagggactcagcaccgccaccaaggacacctatgacgctcttcacatgcaggccctgccgcctcgg

SEQ ID NO: 1424 - protein, 249 aa, Artificial Sequence
  source: /note="Description of Artificial Sequence: Synthetic polypeptide"
QVQLVQSGAEVRKTGASVKVSCKASGYIFDNFGINWVRQAPGQGLEWMGWINPKNNNTNYAQKFQGRVTITADESTNTAYMEVSSLRSEDTAVYYCARGPYYYQSYMDVWGQGTMVTVSSASGGGGSGGRASGGGGSDIVMTQTPLSLPVTPGEPASISCRSSQSLLHSNGYNYLNWYLQKPGQSPQLLIYLGSKRASGVPDRFSGSGSGTDFTLHITRVGAEDVGVYYCMQALQTPYTFGQGTKLEIK

SEQ ID NO: 1425 - DNA, 747 bp, Artificial Sequence
  source: /note="Description of Artificial Sequence: Synthetic polynucleotide"
caagtccaactcgtccagtccggcgcagaagtcagaaaaaccggtgctagcgtgaaagtgtcctgcaaggcctccggctacattttcgataacttcggaatcaactgggtcagacaggccccgggccaggggctggaatggatgggatggatcaaccccaagaacaacaacaccaactacgcacagaagttccagggccgcgtgactatcaccgccgatgaatcgaccaataccgcctacatggaggtgtcctccctgcggtcggaggacactgccgtgtattactgcgcgaggggcccatactactaccaaagctacatggacgtctggggacagggaaccatggtgaccgtgtcatccgcctccggtggtggaggctccggggggcgggcttcaggaggcggaggaagcgatattgtgatgacccagactccgcttagcctgcccgtgactcctggagaaccggcctccatttcctgccggtcctcgcaatcactcctgcattccaacggttacaactacctgaattggtacctccagaagcctggccagtcgccccagttgctgatctatctgggctcgaagcgcgcctccggggtgcctgaccggtttagcggatctgggagcggcacggacttcactctccacatcacccgcgtgggagcggaggacgtgggagtgtactactgtatgcaggcgctgcagactccgtacacattcggacagggcaccaagctggagatcaag

SEQ ID NO: 1426 - protein, 120 aa, Artificial Sequence
  source: /note="Description of Artificial Sequence: Synthetic polypeptide"
QVQLVQSGAEVRKTGASVKVSCKASGYIFDNFGINWVRQAPGQGLEWMGWINPKNNNTNYAQKFQGRVTITADESTNTAYMEVSSLRSEDTAVYYCARGPYYYQSYMDVWGQGTMVTVSS

SEQ ID NO: 1427 - protein, 112 aa, Artificial Sequence
  source: /note="Description of Artificial Sequence: Synthetic polypeptide"
DIVMTQTPLSLPVTPGEPASISCRSSQSLLHSNGYNYLNWYLQKPGQSPQLLIYLGSKRASGVPDRFSGSGSGTDFTLHITRVGAEDVGVYYCMQALQTPYTFGQGTKLEIK

SEQ ID NO: 1428 - protein, 493 aa, Artificial Sequence
  source: /note="Description of Artificial Sequence: Synthetic polypeptide"
MALPVTALLLPLALLLHAARPQVQLVQSGAEVRKTGASVKVSCKASGYIFDNFGINWVRQAPGQGLEWMGWINPKNNNTNYAQKFQGRVTITADESTNTAYMEVSSLRSEDTAVYYCARGPYYYQSYMDVWGQGTMVTVSSASGGGGSGGRASGGGGSDIVMTQTPLSLPVTPGEPASISCRSSQSLLHSNGYNYLNWYLQKPGQSPQLLIYLGSKRASGVPDRFSGSGSGTDFTLHITRVGAEDVGVYYCMQALQTPYTFGQGTKLEIKTTTPAPRPPTPAPTIASQPLSLRPEACRPAAGGAVHTRGLDFACDIYIWAPLAGTCGVLLLSLVITLYCKRGRKKLLYIFKQPFMRPVQTTQEEDGCSCRFPEEEEGGCELRVKFSRSADAPAYKQGQNQLYNELNLGRREEYDVLDKRRGRDPEMGGKPRRKNPQEGLYNELQKDKMAEAYSEIGMKGERRRGKGHDGLYQGLSTATKDTYDALHMQALPPR

SEQ ID NO: 1429 - DNA, 1479 bp, Artificial Sequence
  source: /note="Description of Artificial Sequence: Synthetic polynucleotide"
atggccctccctgtcaccgccctgctgcttccgctggctcttctgctccacgccgctcggccccaagtccaactcgtccagtccggcgcagaagtcagaaaaaccggtgctagcgtgaaagtgtcctgcaaggcctccggctacattttcgataacttcggaatcaactgggtcagacaggccccgggccaggggctggaatggatgggatggatcaaccccaagaacaacaacaccaactacgcacagaagttccagggccgcgtgactatcaccgccgatgaatcgaccaataccgcctacatggaggtgtcctccctgcggtcggaggacactgccgtgtattactgcgcgaggggcccatactactaccaaagctacatggacgtctggggacagggaaccatggtgaccgtgtcatccgcctccggtggtggaggctccggggggcgggcttcaggaggcggaggaagcgatattgtgatgacccagactccgcttagcctgcccgtgactcctggagaaccggcctccatttcctgccggtcctcgcaatcactcctgcattccaacggttacaactacctgaattggtacctccagaagcctggccagtcgccccagttgctgatctatctgggctcgaagcgcgcctccggggtgcctgaccggtttagcggatctgggagcggcacggacttcactctccacatcacccgcgtgggagcggaggacgtgggagtgtactactgtatgcaggcgctgcagactccgtacacattcggacagggcaccaagctggagatcaagaccactaccccagcaccgaggccacccaccccggctcctaccatcgcctcccagcctctgtccctgcgtccggaggcatgtagacccgcagctggtggggccgtgcatacccggggtcttgacttcgcctgcgatatctacatttgggcccctctggctggtacttgcggggtcctgctgctttcactcgtgatcactctttactgtaagcgcggtcggaagaagctgctgtacatctttaagcaacccttcatgaggcctgtgcagactactcaagaggaggacggctgttcatgccggttcccagaggaggaggaaggcggctgcgaactgcgcgtgaaattcagccgcagcgcagatgctccagcctacaagcaggggcagaaccagctctacaacgaactcaatcttggtcggagagaggagtacgacgtgctggacaagcggagaggacgggacccagaaatgggcgggaagccgcgcagaaagaatccccaagagggcctgtacaacgagctccaaaaggataagatggcagaagcctatagcgagattggtatgaaaggggaacgcagaagaggcaaaggccacgacggactgtaccagggactcagcaccgccaccaaggacacctatgacgctcttcacatgcaggccctgccgcctcgg

SEQ ID NO: 1430 - protein, 246 aa, Artificial Sequence
  source: /note="Description of Artificial Sequence: Synthetic polypeptide"
QVQLQESGGGLVQPGGSLRLSCAASGFTFSSDAMTWVRQAPGKGLEWVSVISGSGGTTYYADSVKGRFTISRDNSKNTLYLQMNSLRAEDTAVYYCAKLDSSGYYYARGPRYWGQGTLVTVSSASGGGGSGGRASGGGGSDIQLTQSPSSLSASVGDRVTITCRASQSISSYLNWYQQKPGKAPKLLIYGASTLASGVPARFSGSGSGTHFTLTINSLQSEDSATYYCQQSYKRASFGQGTKVEIK

SEQ ID NO: 1431 - DNA, 738 bp, Artificial Sequence
  source: /note="Description of Artificial Sequence: Synthetic polynucleotide"
caagtgcaacttcaagaatcaggcggaggactcgtgcagcccggaggatcattgcggctctcgtgcgccgcctcgggcttcaccttctcgagcgacgccatgacctgggtccgccaggccccggggaaggggctggaatgggtgtctgtgatttccggctccgggggaactacgtactacgccgattccgtgaaaggtcgcttcactatctcccgggacaacagcaagaacaccctttatctgcaaatgaattccctccgcgccgaggacaccgccgtgtactactgcgccaagctggactcctcgggctactactatgcccggggtccgagatactggggacagggaaccctcgtgaccgtgtcctccgcgtccggcggaggagggtcgggagggcgggcctccggcggcggcggttcggacatccagctgacccagtccccatcctcactgagcgcaagcgtgggcgacagagtcaccattacatgcagggcgtcccagagcatcagctcctacctgaactggtaccaacagaagcctggaaaggctcctaagctgttgatctacggggcttcgaccctggcatccggggtgcccgcgaggtttagcggaagcggtagcggcactcacttcactctgaccattaacagcctccagtccgaggattcagccacttactactgtcagcagtcctacaagcgggccagcttcggacagggcactaaggtcgagatcaag

SEQ ID NO: 1432 - protein, 123 aa, Artificial Sequence
  source: /note="Description of Artificial Sequence: Synthetic polypeptide"
QVQLQESGGGLVQPGGSLRLSCAASGFTFSSDAMTWVRQAPGKGLEWVSVISGSGGTTYYADSVKGRFTISRDNSKNTLYLQMNSLRAEDTAVYYCAKLDSSGYYYARGPRYWGQGTLVTVSS

SEQ ID NO: 1433 - protein, 106 aa, Artificial Sequence
  source: /note="Description of Artificial Sequence: Synthetic polypeptide"
DIQLTQSPSSLSASVGDRVTITCRASQSISSYLNWYQQKPGKAPKLLIYGASTLASGVPARFSGSGSGTHFTLTINSLQSEDSATYYCQQSYKRASFGQGTKVEIK

SEQ ID NO: 1434 - protein, 490 aa, Artificial Sequence
  source: /note="Description of Artificial Sequence: Synthetic polypeptide"
MALPVTALLLPLALLLHAARPQVQLQESGGGLVQPGGSLRLSCAASGFTFSSDAMTWVRQAPGKGLEWVSVISGSGGTTYYADSVKGRFTISRDNSKNTLYLQMNSLRAEDTAVYYCAKLDSSGYYYARGPRYWGQGTLVTVSSASGGGGSGGRASGGGGSDIQLTQSPSSLSASVGDRVTITCRASQSISSYLNWYQQKPGKAPKLLIYGASTLASGVPARFSGSGSGTHFTLTINSLQSEDSATYYCQQSYKRASFGQGTKVEIKTTTPAPRPPTPAPTIASQPLSLRPEACRPAAGGAVHTRGLDFACDIYIWAPLAGTCGVLLLSLVITLYCKRGRKKLLYIFKQPFMRPVQTTQEEDGCSCRFPEEEEGGCELRVKFSRSADAPAYKQGQNQLYNELNLGRREEYDVLDKRRGRDPEMGGKPRRKNPQEGLYNELQKDKMAEAYSEIGMKGERRRGKGHDGLYQGLSTATKDTYDALHMQALPPR

SEQ ID NO: 1435 - DNA, 1470 bp, Artificial Sequence
  source: /note="Description of Artificial Sequence: Synthetic polynucleotide"
atggccctccctgtcaccgccctgctgcttccgctggctcttctgctccacgccgctcggccccaagtgcaacttcaagaatcaggcggaggactcgtgcagcccggaggatcattgcggctctcgtgcgccgcctcgggcttcaccttctcgagcgacgccatgacctgggtccgccaggccccggggaaggggctggaatgggtgtctgtgatttccggctccgggggaactacgtactacgccgattccgtgaaaggtcgcttcactatctcccgggacaacagcaagaacaccctttatctgcaaatgaattccctccgcgccgaggacaccgccgtgtactactgcgccaagctggactcctcgggctactactatgcccggggtccgagatactggggacagggaaccctcgtgaccgtgtcctccgcgtccggcggaggagggtcgggagggcgggcctccggcggcggcggttcggacatccagctgacccagtccccatcctcactgagcgcaagcgtgggcgacagagtcaccattacatgcagggcgtcccagagcatcagctcctacctgaactggtaccaacagaagcctggaaaggctcctaagctgttgatctacggggcttcgaccctggcatccggggtgcccgcgaggtttagcggaagcggtagcggcactcacttcactctgaccattaacagcctccagtccgaggattcagccacttactactgtcagcagtcctacaagcgggccagcttcggacagggcactaaggtcgagatcaagaccactaccccagcaccgaggccacccaccccggctcctaccatcgcctcccagcctctgtccctgcgtccggaggcatgtagacccgcagctggtggggccgtgcatacccggggtcttgacttcgcctgcgatatctacatttgggcccctctggctggtacttgcggggtcctgctgctttcactcgtgatcactctttactgtaagcgcggtcggaagaagctgctgtacatctttaagcaacccttcatgaggcctgtgcagactactcaagaggaggacggctgttcatgccggttcccagaggaggaggaaggcggctgcgaactgcgcgtgaaattcagccgcagcgcagatgctccagcctacaagcaggggcagaaccagctctacaacgaactcaatcttggtcggagagaggagtacgacgtgctggacaagcggagaggacgggacccagaaatgggcgggaagccgcgcagaaagaatccccaagagggcctgtacaacgagctccaaaaggataagatggcagaagcctatagcgagattggtatgaaaggggaacgcagaagaggcaaaggccacgacggactgtaccagggactcagcaccgccaccaaggacacctatgacgctcttcacatgcaggccctgccgcctcgg

SEQ ID NO: 1436 - protein, 247 aa, Artificial Sequence
  source: /note="Description of Artificial Sequence: Synthetic polypeptide"
QVQLVQSGAEVKKPGASVKVSCKASGYTFSNYGITWVRQAPGQGLEWMGWISAYNGNTNYAQKFQGRVTMTRNTSISTAYMELSSLRSEDTAVYYCARGPYYYYMDVWGKGTMVTVSSASGGGGSGGRASGGGGSEIVMTQSPLSLPVTPGEPASISCRSSQSLLYSNGYNYVDWYLQKPGQSPQLLIYLGSNRASGVPDRFSGSGSGTDFKLQISRVEAEDVGIYYCMQGRQFPYSFGQGTKVEIK

SEQ ID NO: 1437 - DNA, 741 bp, Artificial Sequence
  source: /note="Description of Artificial Sequence: Synthetic polynucleotide"
caagtccaactggtccagagcggtgcagaagtgaagaagcccggagcgagcgtgaaagtgtcctgcaaggcttccgggtacaccttctccaactacggcatcacttgggtgcgccaggccccgggacagggcctggaatggatggggtggatttccgcgtacaacggcaatacgaactacgctcagaagttccagggtagagtgaccatgactaggaacacctccatttccaccgcctacatggaactgtcctccctgcggagcgaggacaccgccgtgtactattgcgcccggggaccatactactactacatggatgtctgggggaaggggactatggtcaccgtgtcatccgcctcgggaggcggcggatcaggaggacgcgcctctggtggtggaggatcggagatcgtgatgacccagagccctctctccttgcccgtgactcctggggagcccgcatccatttcatgccggagctcccagtcacttctctactccaacggctataactacgtggattggtacctccaaaagccgggccagagcccgcagctgctgatctacctgggctcgaacagggccagcggagtgcctgaccggttctccgggtcgggaagcgggaccgacttcaagctgcaaatctcgagagtggaggccgaggacgtgggaatctactactgtatgcagggccgccagtttccgtactcgttcggacagggcaccaaagtggaaatcaag

SEQ ID NO: 1438 - protein, 118 aa, Artificial Sequence
  source: /note="Description of Artificial Sequence: Synthetic polypeptide"
QVQLVQSGAEVKKPGASVKVSCKASGYTFSNYGITWVRQAPGQGLEWMGWISAYNGNTNYAQKFQGRVTMTRNTSISTAYMELSSLRSEDTAVYYCARGPYYYYMDVWGKGTMVTVSS

SEQ ID NO: 1439 - protein, 112 aa, Artificial Sequence
  source: /note="Description of Artificial Sequence: Synthetic polypeptide"
EIVMTQSPLSLPVTPGEPASISCRSSQSLLYSNGYNYVDWYLQKPGQSPQLLIYLGSNRASGVPDRFSGSGSGTDFKLQISRVEAEDVGIYYCMQGRQFPYSFGQGTKVEIK

SEQ ID NO: 1440 - protein, 491 aa, Artificial Sequence
  source: /note="Description of Artificial Sequence: Synthetic polypeptide"
MALPVTALLLPLALLLHAARPQVQLVQSGAEVKKPGASVKVSCKASGYTFSNYGITWVRQAPGQGLEWMGWISAYNGNTNYAQKFQGRVTMTRNTSISTAYMELSSLRSEDTAVYYCARGPYYYYMDVWGKGTMVTVSSASGGGGSGGRASGGGGSEIVMTQSPLSLPVTPGEPASISCRSSQSLLYSNGYNYVDWYLQKPGQSPQLLIYLGSNRASGVPDRFSGSGSGTDFKLQISRVEAEDVGIYYCMQGRQFPYSFGQGTKVEIKTTTPAPRPPTPAPTIASQPLSLRPEACRPAAGGAVHTRGLDFACDIYIWAPLAGTCGVLLLSLVITLYCKRGRKKLLYIFKQPFMRPVQTTQEEDGCSCRFPEEEEGGCELRVKFSRSADAPAYKQGQNQLYNELNLGRREEYDVLDKRRGRDPEMGGKPRRKNPQEGLYNELQKDKMAEAYSEIGMKGERRRGKGHDGLYQGLSTATKDTYDALHMQALPPR

SEQ ID NO: 1441 - DNA, 1473 bp, Artificial Sequence
  source: /note="Description of Artificial Sequence: Synthetic polynucleotide"
atggccctccctgtcaccgccctgctgcttccgctggctcttctgctccacgccgctcggccccaagtccaactggtccagagcggtgcagaagtgaagaagcccggagcgagcgtgaaagtgtcctgcaaggcttccgggtacaccttctccaactacggcatcacttgggtgcgccaggccccgggacagggcctggaatggatggggtggatttccgcgtacaacggcaatacgaactacgctcagaagttccagggtagagtgaccatgactaggaacacctccatttccaccgcctacatggaactgtcctccctgcggagcgaggacaccgccgtgtactattgcgcccggggaccatactactactacatggatgtctgggggaaggggactatggtcaccgtgtcatccgcctcgggaggcggcggatcaggaggacgcgcctctggtggtggaggatcggagatcgtgatgacccagagccctctctccttgcccgtgactcctggggagcccgcatccatttcatgccggagctcccagtcacttctctactccaacggctataactacgtggattggtacctccaaaagccgggccagagcccgcagctgctgatctacctgggctcgaacagggccagcggagtgcctgaccggttctccgggtcgggaagcgggaccgacttcaagctgcaaatctcgagagtggaggccgaggacgtgggaatctactactgtatgcagggccgccagtttccgtactcgttcggacagggcaccaaagtggaaatcaagaccactaccccagcaccgaggccacccaccccggctcctaccatcgcctcccagcctctgtccctgcgtccggaggcatgtagacccgcagctggtggggccgtgcatacccggggtcttgacttcgcctgcgatatctacatttgggcccctctggctggtacttgcggggtcctgctgctttcactcgtgatcactctttactgtaagcgcggtcggaagaagctgctgtacatctttaagcaacccttcatgaggcctgtgcagactactcaagaggaggacggctgttcatgccggttcccagaggaggaggaaggcggctgcgaactgcgcgtgaaattcagccgcagcgcagatgctccagcctacaagcaggggcagaaccagctctacaacgaactcaatcttggtcggagagaggagtacgacgtgctggacaagcggagaggacgggacccagaaatgggcgggaagccgcgcagaaagaatccccaagagggcctgtacaacgagctccaaaaggataagatggcagaagcctatagcgagattggtatgaaaggggaacgcagaagaggcaaaggccacgacggactgtaccagggactcagcaccgccaccaaggacacctatgacgctcttcacatgcaggccctgccgcctcgg

SEQ ID NO: 1442 - protein, 238 aa, Artificial Sequence
  source: /note="Description of Artificial Sequence: Synthetic polypeptide"
EVQLLETGGGLVQPGGSLRLSCAVSGFALSNHGMSWVRRAPGKGLEWVSGIVYSGSTYYAASVKGRFTISRDNSRNTLYLQMNSLRPEDTAIYYCSAHGGESDVWGQGTTVTVSSASGGGGSGGRASGGGGSEIVLTQSPATLSVSPGESATLSCRASQSVSSNLAWYQQKPGQAPRLLIYGASTRASGIPDRFSGSGSGTDFTLTISSLQAEDVAVYYCQQYGSSLTFGGGTKVEIK

SEQ ID NO: 1443 - DNA, 714 bp, Artificial Sequence
  source: /note="Description of Artificial Sequence: Synthetic polynucleotide"
gaagtgcaattgctcgaaactggaggaggtctggtgcaacctggaggatcacttcgcctgtcctgcgccgtgtcgggctttgccctgtccaaccatggaatgagctgggtccgccgcgcgccggggaagggcctcgaatgggtgtccggcatcgtctactccggctccacctactacgccgcgtccgtgaagggccggttcacgatttcacgggacaactcgcggaacaccctgtacctccaaatgaattcccttcggccggaggatactgccatctactactgctccgcccacggtggcgaatccgacgtctggggccagggaaccaccgtgaccgtgtccagcgcgtccgggggaggaggaagcgggggtagagcatcgggtggaggcggatcagagatcgtgctgacccagtcccccgccaccttgagcgtgtcaccaggagagtccgccaccctgtcatgccgcgccagccagtccgtgtcctccaacctggcttggtaccagcagaagccggggcaggcccctagactcctgatctatggggcgtcgacccgggcatctggaattcccgataggttcagcggatcgggctcgggcactgacttcactctgaccatctcctcgctgcaagccgaggacgtggctgtgtactactgtcagcagtacggaagctccctgactttcggtggcgggaccaaagtcgagattaag

SEQ ID NO: 1444 - protein, 115 aa, Artificial Sequence
  source: /note="Description of Artificial Sequence: Synthetic polypeptide"
EVQLLETGGGLVQPGGSLRLSCAVSGFALSNHGMSWVRRAPGKGLEWVSGIVYSGSTYYAASVKGRFTISRDNSRNTLYLQMNSLRPEDTAIYYCSAHGGESDVWGQGTTVTVSS

SEQ ID NO: 1445 - protein, 106 aa, Artificial Sequence
  source: /note="Description of Artificial Sequence: Synthetic polypeptide"
EIVLTQSPATLSVSPGESATLSCRASQSVSSNLAWYQQKPGQAPRLLIYGASTRASGIPDRFSGSGSGTDFTLTISSLQAEDVAVYYCQQYGSSLTFGGGTKVEIK

SEQ ID NO: 1446 - protein, 482 aa, Artificial Sequence
  source: /note="Description of Artificial Sequence: Synthetic polypeptide"
MALPVTALLLPLALLLHAARPEVQLLETGGGLVQPGGSLRLSCAVSGFALSNHGMSWVRRAPGKGLEWVSGIVYSGSTYYAASVKGRFTISRDNSRNTLYLQMNSLRPEDTAIYYCSAHGGESDVWGQGTTVTVSSASGGGGSGGRASGGGGSEIVLTQSPATLSVSPGESATLSCRASQSVSSNLAWYQQKPGQAPRLLIYGASTRASGIPDRFSGSGSGTDFTLTISSLQAEDVAVYYCQQYGSSLTFGGGTKVEIKTTTPAPRPPTPAPTIASQPLSLRPEACRPAAGGAVHTRGLDFACDIYIWAPLAGTCGVLLLSLVITLYCKRGRKKLLYIFKQPFMRPVQTTQEEDGCSCRFPEEEEGGCELRVKFSRSADAPAYKQGQNQLYNELNLGRREEYDVLDKRRGRDPEMGGKPRRKNPQEGLYNELQKDKMAEAYSEIGMKGERRRGKGHDGLYQGLSTATKDTYDALHMQALPPR

SEQ ID NO: 1447 - DNA, 1446 bp, Artificial Sequence
  source: /note="Description of Artificial Sequence: Synthetic polynucleotide"
atggccctccctgtcaccgccctgctgcttccgctggctcttctgctccacgccgctcggcccgaagtgcaattgctcgaaactggaggaggtctggtgcaacctggaggatcacttcgcctgtcctgcgccgtgtcgggctttgccctgtccaaccatggaatgagctgggtccgccgcgcgccggggaagggcctcgaatgggtgtccggcatcgtctactccggctccacctactacgccgcgtccgtgaagggccggttcacgatttcacgggacaactcgcggaacaccctgtacctccaaatgaattcccttcggccggaggatactgccatctactactgctccgcccacggtggcgaatccgacgtctggggccagggaaccaccgtgaccgtgtccagcgcgtccgggggaggaggaagcgggggtagagcatcgggtggaggcggatcagagatcgtgctgacccagtcccccgccaccttgagcgtgtcaccaggagagtccgccaccctgtcatgccgcgccagccagtccgtgtcctccaacctggcttggtaccagcagaagccggggcaggcccctagactcctgatctatggggcgtcgacccgggcatctggaattcccgataggttcagcggatcgggctcgggcactgacttcactctgaccatctcctcgctgcaagccgaggacgtggctgtgtactactgtcagcagtacggaagctccctgactttcggtggcgggaccaaagtcgagattaagaccactaccccagcaccgaggccacccaccccggctcctaccatcgcctcccagcctctgtccctgcgtccggaggcatgtagacccgcagctggtggggccgtgcatacccggggtcttgacttcgcctgcgatatctacatttgggcccctctggctggtacttgcggggtcctgctgctttcactcgtgatcactctttactgtaagcgcggtcggaagaagctgctgtacatctttaagcaacccttcatgaggcctgtgcagactactcaagaggaggacggctgttcatgccggttcccagaggaggaggaaggcggctgcgaactgcgcgtgaaattcagccgcagcgcagatgctccagcctacaagcaggggcagaaccagctctacaacgaactcaatcttggtcggagagaggagtacgacgtgctggacaagcggagaggacgggacccagaaatgggcgggaagccgcgcagaaagaatccccaagagggcctgtacaacgagctccaaaaggataagatggcagaagcctatagcgagattggtatgaaaggggaacgcagaagaggcaaaggccacgacggactgtaccagggactcagcaccgccaccaaggacacctatgacgctcttcacatgcaggccctgccgcctcgg

SEQ ID NO: 1448 - protein, 239 aa, Artificial Sequence
  source: /note="Description of Artificial Sequence: Synthetic polypeptide"
EVQLVETGGGLVQPGGSLRLSCAVSGFALSNHGMSWVRRAPGKGLEWVSGIVYSGSTYYAASVKGRFTISRDNSRNTLYLQMNSLRPEDTAIYYCSAHGGESDVWGQGTTVTVSSASGGGGSGGRASGGGGSEIVMTQSPATLSVSPGERATLSCRASQSVSSKLAWYQQKPGQAPRLLMYGASIRATGIPDRFSGSGSGTEFTLTISSLEPEDFAVYYCQQYGSSSWTFGQGTKVEIK

SEQ ID NO: 1449 - DNA, 717 bp, Artificial Sequence
  source: /note="Description of Artificial Sequence: Synthetic polynucleotide"
gaagtgcaattggtggaaactggaggaggacttgtgcaacctggaggatcattgagactgagctgcgcagtgtcgggattcgccctgagcaaccatggaatgtcctgggtcagaagggcccctggaaaaggcctcgaatgggtgtcagggatcgtgtactccggttccacttactacgccgcctccgtgaaggggcgcttcactatctcacgggataactcccgcaataccctgtacctccaaatgaacagcctgcggccggaggataccgccatctactactgttccgcccacggtggagagtctgacgtctggggccagggaactaccgtgaccgtgtcctccgcgtccggcggtggagggagcggcggccgcgccagcggcggcggaggctccgagatcgtgatgacccagagccccgctactctgtcggtgtcgcccggagaaagggcgaccctgtcctgccgggcgtcgcagtccgtgagcagcaagctggcttggtaccagcagaagccgggccaggcaccacgcctgcttatgtacggtgcctccattcgggccaccggaatcccggaccggttctcggggtcggggtccggtaccgagttcacactgaccatttcctcgctcgagcccgaggactttgccgtctattactgccagcagtacggctcctcctcatggacgttcggccaggggaccaaggtcgaaatcaag

SEQ ID NO: 1450 - protein, 115 aa, Artificial Sequence
  source: /note="Description of Artificial Sequence: Synthetic polypeptide"
EVQLVETGGGLVQPGGSLRLSCAVSGFALSNHGMSWVRRAPGKGLEWVSGIVYSGSTYYAASVKGRFTISRDNSRNTLYLQMNSLRPEDTAIYYCSAHGGESDVWGQGTTVTVSS

SEQ ID NO: 1451 - protein, 107 aa, Artificial Sequence
  source: /note="Description of Artificial Sequence: Synthetic polypeptide"
EIVMTQSPATLSVSPGERATLSCRASQSVSSKLAWYQQKPGQAPRLLMYGASIRATGIPDRFSGSGSGTEFTLTISSLEPEDFAVYYCQQYGSSSWTFGQGTKVEIK

SEQ ID NO: 1452 - protein, 483 aa, Artificial Sequence
  source: /note="Description of Artificial Sequence: Synthetic polypeptide"
MALPVTALLLPLALLLHAARPEVQLVETGGGLVQPGGSLRLSCAVSGFALSNHGMSWVRRAPGKGLEWVSGIVYSGSTYYAASVKGRFTISRDNSRNTLYLQMNSLRPEDTAIYYCSAHGGESDVWGQGTTVTVSSASGGGGSGGRASGGGGSEIVMTQSPATLSVSPGERATLSCRASQSVSSKLAWYQQKPGQAPRLLMYGASIRATGIPDRFSGSGSGTEFTLTISSLEPEDFAVYYCQQYGSSSWTFGQGTKVEIKTTTPAPRPPTPAPTIASQPLSLRPEACRPAAGGAVHTRGLDFACDIYIWAPLAGTCGVLLLSLVITLYCKRGRKKLLYIFKQPFMRPVQTTQEEDGCSCRFPEEEEGGCELRVKFSRSADAPAYKQGQNQLYNELNLGRREEYDVLDKRRGRDPEMGGKPRRKNPQEGLYNELQKDKMAEAYSEIGMKGERRRGKGHDGLYQGLSTATKDTYDALHMQALPPR

SEQ ID NO: 1453 - DNA, 1449 bp, Artificial Sequence
  source: /note="Description of Artificial Sequence: Synthetic polynucleotide"
atggccctccctgtcaccgccctgctgcttccgctggctcttctgctccacgccgctcggcccgaagtgcaattggtggaaactggaggaggacttgtgcaacctggaggatcattgagactgagctgcgcagtgtcgggattcgccctgagcaaccatggaatgtcctgggtcagaagggcccctggaaaaggcctcgaatgggtgtcagggatcgtgtactccggttccacttactacgccgcctccgtgaaggggcgcttcactatctcacgggataactcccgcaataccctgtacctccaaatgaacagcctgcggccggaggataccgccatctactactgttccgcccacggtggagagtctgacgtctggggccagggaactaccgtgaccgtgtcctccgcgtccggcggtggagggagcggcggccgcgccagcggcggcggaggctccgagatcgtgatgacccagagccccgctactctgtcggtgtcgcccggagaaagggcgaccctgtcctgccgggcgtcgcagtccgtgagcagcaagctggcttggtaccagcagaagccgggccaggcaccacgcctgcttatgtacggtgcctccattcgggccaccggaatcccggaccggttctcggggtcggggtccggtaccgagttcacactgaccatttcctcgctcgagcccgaggactttgccgtctattactgccagcagtacggctcctcctcatggacgttcggccaggggaccaaggtcgaaatcaagaccactaccccagcaccgaggccacccaccccggctcctaccatcgcctcccagcctctgtccctgcgtccggaggcatgtagacccgcagctggtggggccgtgcatacccggggtcttgacttcgcctgcgatatctacatttgggcccctctggctggtacttgcggggtcctgctgctttcactcgtgatcactctttactgtaagcgcggtcggaagaagctgctgtacatctttaagcaacccttcatgaggcctgtgcagactactcaagaggaggacggctgttcatgccggttcccagaggaggaggaaggcggctgcgaactgcgcgtgaaattcagccgcagcgcagatgctccagcctacaagcaggggcagaaccagctctacaacgaactcaatcttggtcggagagaggagtacgacgtgctggacaagcggagaggacgggacccagaaatgggcgggaagccgcgcagaaagaatccccaagagggcctgtacaacgagctccaaaaggataagatggcagaagcctatagcgagattggtatgaaaggggaacgcagaagaggcaaaggccacgacggactgtaccagggactcagcaccgccaccaaggacacctatgacgctcttcacatgcaggccctgccgcctcgg

SEQ ID NO: 1454 - protein, 241 aa, Artificial Sequence
  source: /note="Description of Artificial Sequence: Synthetic polypeptide"
EVQLVETGGGVVQPGGSLRLSCAVSGFALSNHGMSWVRRAPGKGLEWVSGIVYSGSTYYAASVKGRFTISRDNSRNTLYLQMNSLRPEDTAIYYCSAHGGESDVWGQGTTVTVSSASGGGGSGGRASGGGGSEIVLTQSPGTLSLSPGERATLSCRASQSVGSTNLAWYQQKPGQAPRLLIYDASNRATGIPDRFSGGGSGTDFTLTISRLEPEDFAVYYCQQYGSSPPWTFGQGTKVEIK

SEQ ID NO: 1455 - DNA, 723 bp, Artificial Sequence
  source: /note="Description of Artificial Sequence: Synthetic polynucleotide"
gaagtgcaattggtggagactggaggaggagtggtgcaacctggaggaagcctgagactgtcatgcgcggtgtcgggcttcgccctctccaaccacggaatgtcctgggtccgccgggcccctgggaaaggacttgaatgggtgtccggcatcgtgtactcgggttccacctactacgcggcctcagtgaagggccggtttactattagccgcgacaactccagaaacacactgtacctccaaatgaactcgctgcggccggaagataccgctatctactactgctccgcccatgggggagagtcggacgtctggggacagggcaccactgtcactgtgtccagcgcttccggcggtggtggaagcgggggacgggcctcaggaggcggtggcagcgagattgtgctgacccagtcccccgggaccctgagcctgtccccgggagaaagggccaccctctcctgtcgggcatcccagtccgtggggtctactaaccttgcatggtaccagcagaagcccggccaggcccctcgcctgctgatctacgacgcgtccaatagagccaccggcatcccggatcgcttcagcggaggcggatcgggcaccgacttcaccctcaccatttcaaggctggaaccggaggacttcgccgtgtactactgccagcagtatggttcgtccccaccctggacgttcggccaggggactaaggtcgagatcaag

SEQ ID NO: 1456 - protein, 115 aa, Artificial Sequence
  source: /note="Description of Artificial Sequence: Synthetic polypeptide"
EVQLVETGGGVVQPGGSLRLSCAVSGFALSNHGMSWVRRAPGKGLEWVSGIVYSGSTYYAASVKGRFTISRDNSRNTLYLQMNSLRPEDTAIYYCSAHGGESDVWGQGTTVTVSS

SEQ ID NO: 1457 - protein, 109 aa, Artificial Sequence
  source: /note="Description of Artificial Sequence: Synthetic polypeptide"
EIVLTQSPGTLSLSPGERATLSCRASQSVGSTNLAWYQQKPGQAPRLLIYDASNRATGIPDRFSGGGSGTDFTLTISRLEPEDFAVYYCQQYGSSPPWTFGQGTKVEIK

SEQ ID NO: 1458 - protein, 485 aa, Artificial Sequence
  source: /note="Description of Artificial Sequence: Synthetic polypeptide"
MALPVTALLLPLALLLHAARPEVQLVETGGGVVQPGGSLRLSCAVSGFALSNHGMSWVRRAPGKGLEWVSGIVYSGSTYYAASVKGRFTISRDNSRNTLYLQMNSLRPEDTAIYYCSAHGGESDVWGQGTTVTVSSASGGGGSGGRASGGGGSEIVLTQSPGTLSLSPGERATLSCRASQSVGSTNLAWYQQKPGQAPRLLIYDASNRATGIPDRFSGGGSGTDFTLTISRLEPEDFAVYYCQQYGSSPPWTFGQGTKVEIKTTTPAPRPPTPAPTIASQPLSLRPEACRPAAGGAVHTRGLDFACDIYIWAPLAGTCGVLLLSLVITLYCKRGRKKLLYIFKQPFMRPVQTTQEEDGCSCRFPEEEEGGCELRVKFSRSADAPAYKQGQNQLYNELNLGRREEYDVLDKRRGRDPEMGGKPRRKNPQEGLYNELQKDKMAEAYSEIGMKGERRRGKGHDGLYQGLSTATKDTYDALHMQALPPR

SEQ ID NO: 1459 - DNA, 1455 bp, Artificial Sequence
  source: /note="Description of Artificial Sequence: Synthetic polynucleotide"
atggccctccctgtcaccgccctgctgcttccgctggctcttctgctccacgccgctcggcccgaagtgcaattggtggagactggaggaggagtggtgcaacctggaggaagcctgagactgtcatgcgcggtgtcgggcttcgccctctccaaccacggaatgtcctgggtccgccgggcccctgggaaaggacttgaatgggtgtccggcatcgtgtactcgggttccacctactacgcggcctcagtgaagggccggtttactattagccgcgacaactccagaaacacactgtacctccaaatgaactcgctgcggccggaagataccgctatctactactgctccgcccatgggggagagtcggacgtctggggacagggcaccactgtcactgtgtccagcgcttccggcggtggtggaagcgggggacgggcctcaggaggcggtggcagcgagattgtgctgacccagtcccccgggaccctgagcctgtccccgggagaaagggccaccctctcctgtcgggcatcccagtccgtggggtctactaaccttgcatggtaccagcagaagcccggccaggcccctcgcctgctgatctacgacgcgtccaatagagccaccggcatcccggatcgcttcagcggaggcggatcgggcaccgacttcaccctcaccatttcaaggctggaaccggaggacttcgccgtgtactactgccagcagtatggttcgtccccaccctggacgttcggccaggggactaaggtcgagatcaagaccactaccccagcaccgaggccacccaccccggctcctaccatcgcctcccagcctctgtccctgcgtccggaggcatgtagacccgcagctggtggggccgtgcatacccggggtcttgacttcgcctgcgatatctacatttgggcccctctggctggtacttgcggggtcctgctgctttcactcgtgatcactctttactgtaagcgcggtcggaagaagctgctgtacatctttaagcaacccttcatgaggcctgtgcagactactcaagaggaggacggctgttcatgccggttcccagaggaggaggaaggcggctgcgaactgcgcgtgaaattcagccgcagcgcagatgctccagcctacaagcaggggcagaaccagctctacaacgaactcaatcttggtcggagagaggagtacgacgtgctggacaagcggagaggacgggacccagaaatgggcgggaagccgcgcagaaagaatccccaagagggcctgtacaacgagctccaaaaggataagatggcagaagcctatagcgagattggtatgaaaggggaacgcagaagaggcaaaggccacgacggactgtaccagggactcagcaccgccaccaaggacacctatgacgctcttcacatgcaggccctgccgcctcgg

SEQ ID NO: 1460 - protein, 239 aa, Artificial Sequence
  source: /note="Description of Artificial Sequence: Synthetic polypeptide"
QVQLVESGGGLVKPGGSLRLSCAASGFTFSDYYMSWIRQAPGKGLEWVSYISSSGSTIYYADSVKGRFTISRDNAKNSLYLQMNSLRAEDTAVYYCARESGDGMDVWGQGTTVTVSSASGGGGSGGRASGGGGSDIQMTQSPSSLSASVGDRVTITCRASQSISSYLNWYQQKPGKAPKLLIYAASSLQSGVPSRFSGSGSGTDFTLTISSLQPEDFATYYCQQSYTLAFGQGTKVDIK

SEQ ID NO: 1461 - DNA, 717 bp, Artificial Sequence
  source: /note="Description of Artificial Sequence: Synthetic polynucleotide"
caagtgcaactcgtggaatctggtggaggactcgtgaaacctggaggatcattgagactgtcatgcgcggcctcgggattcacgttctccgattactacatgagctggattcgccaggctccggggaagggactggaatgggtgtcctacatttcctcatccggctccaccatctactacgcggactccgtgaaggggagattcaccattagccgcgataacgccaagaacagcctgtaccttcagatgaactccctgcgggctgaagatactgccgtctactactgcgcaagggagagcggagatgggatggacgtctggggacagggtaccactgtgaccgtgtcgtcggcctccggcggagggggttcgggtggaagggccagcggcggcggaggcagcgacatccagatgacccagtccccctcatcgctgtccgcctccgtgggcgaccgcgtcaccatcacatgccgggcctcacagtcgatctcctcctacctcaattggtatcagcagaagcccggaaaggcccctaagcttctgatctacgcagcgtcctccctgcaatccggggtcccatctcggttctccggctcgggcagcggtaccgacttcactctgaccatctcgagcctgcagccggaggacttcgccacttactactgtcagcaaagctacaccctcgcgtttggccagggcaccaaagtggacatcaag

SEQ ID NO: 1462 - protein, 117 aa, Artificial Sequence
  source: /note="Description of Artificial Sequence: Synthetic polypeptide"
QVQLVESGGGLVKPGGSLRLSCAASGFTFSDYYMSWIRQAPGKGLEWVSYISSSGSTIYYADSVKGRFTISRDNAKNSLYLQMNSLRAEDTAVYYCARESGDGMDVWGQGTTVTVSS

SEQ ID NO: 1463 - protein, 105 aa, Artificial Sequence
  source: /note="Description of Artificial Sequence: Synthetic polypeptide"
DIQMTQSPSSLSASVGDRVTITCRASQSISSYLNWYQQKPGKAPKLLIYAASSLQSGVPSRFSGSGSGTDFTLTISSLQPEDFATYYCQQSYTLAFGQGTKVDIK

SEQ ID NO: 1464 - protein, 483 aa, Artificial Sequence
  source: /note="Description of Artificial Sequence: Synthetic polypeptide"
MALPVTALLLPLALLLHAARPQVQLVESGGGLVKPGGSLRLSCAASGFTFSDYYMSWIRQAPGKGLEWVSYISSSGSTIYYADSVKGRFTISRDNAKNSLYLQMNSLRAEDTAVYYCARESGDGMDVWGQGTTVTVSSASGGGGSGGRASGGGGSDIQMTQSPSSLSASVGDRVTITCRASQSISSYLNWYQQKPGKAPKLLIYAASSLQSGVPSRFSGSGSGTDFTLTISSLQPEDFATYYCQQSYTLAFGQGTKVDIKTTTPAPRPPTPAPTIASQPLSLRPEACRPAAGGAVHTRGLDFACDIYIWAPLAGTCGVLLLSLVITLYCKRGRKKLLYIFKQPFMRPVQTTQEEDGCSCRFPEEEEGGCELRVKFSRSADAPAYKQGQNQLYNELNLGRREEYDVLDKRRGRDPEMGGKPRRKNPQEGLYNELQKDKMAEAYSEIGMKGERRRGKGHDGLYQGLSTATKDTYDALHMQALPPR

SEQ ID NO: 1465 - DNA, 1449 bp, Artificial Sequence
  source: /note="Description of Artificial Sequence: Synthetic polynucleotide"
atggccctccctgtcaccgccctgctgcttccgctggctcttctgctccacgccgctcggccccaagtgcaactcgtggaatctggtggaggactcgtgaaacctggaggatcattgagactgtcatgcgcggcctcgggattcacgttctccgattactacatgagctggattcgccaggctccggggaagggactggaatgggtgtcctacatttcctcatccggctccaccatctactacgcggactccgtgaaggggagattcaccattagccgcgataacgccaagaacagcctgtaccttcagatgaactccctgcgggctgaagatactgccgtctactactgcgcaagggagagcggagatgggatggacgtctggggacagggtaccactgtgaccgtgtcgtcggcctccggcggagggggttcgggtggaagggccagcggcggcggaggcagcgacatccagatgacccagtccccctcatcgctgtccgcctccgtgggcgaccgcgtcaccatcacatgccgggcctcacagtcgatctcctcctacctcaattggtatcagcagaagcccggaaaggcccctaagcttctgatctacgcagcgtcctccctgcaatccggggtcccatctcggttctccggctcgggcagcggtaccgacttcactctgaccatctcgagcctgcagccggaggacttcgccacttactactgtcagcaaagctacaccctcgcgtttggccagggcaccaaagtggacatcaagaccactaccccagcaccgaggccacccaccccggctcctaccatcgcctcccagcctctgtccctgcgtccggaggcatgtagacccgcagctggtggggccgtgcatacccggggtcttgacttcgcctgcgatatctacatttgggcccctctggctggtacttgcggggtcctgctgctttcactcgtgatcactctttactgtaagcgcggtcggaagaagctgctgtacatctttaagcaacccttcatgaggcctgtgcagactactcaagaggaggacggctgttcatgccggttcccagaggaggaggaaggcggctgcgaactgcgcgtgaaattcagccgcagcgcagatgctccagcctacaagcaggggcagaaccagctctacaacgaactcaatcttggtcggagagaggagtacgacgtgctggacaagcggagaggacgggacccagaaatgggcgggaagccgcgcagaaagaatccccaagagggcctgtacaacgagctccaaaaggataagatggcagaagcctatagcgagattggtatgaaaggggaacgcagaagaggcaaaggccacgacggactgtaccagggactcagcaccgccaccaaggacacctatgacgctcttcacatgcaggccctgccgcctcgg

SEQ ID NO: 1466 - protein, 246 aa, Artificial Sequence
  source: /note="Description of Artificial Sequence: Synthetic polypeptide"
QVQLVQSGGGLVKPGGSLRLSCAASGFTFSDYYMSWIRQAPGKGLEWVSYISSSGNTIYYADSVKGRFTISRDNAKNSLYLQMNSLRAEDTAVYYCARSTMVREDYWGQGTLVTVSSASGGGGSGGRASGGGGSDIVLTQSPLSLPVTLGQPASISCKSSESLVHNSGKTYLNWFHQRPGQSPRRLIYEVSNRDSGVPDRFTGSGSGTDFTLKISRVEAEDVGVYYCMQGTHWPGTFGQGTKLEIK

SEQ ID NO: 1467 - DNA, 738 bp, Artificial Sequence
  source: /note="Description of Artificial Sequence: Synthetic polynucleotide"
caagtgcaactggtgcaaagcggaggaggattggtcaaacccggaggaagcctgagactgtcatgcgcggcctctggattcaccttctccgattactacatgtcatggatcagacaggccccggggaagggcctcgaatgggtgtcctacatctcgtcctccgggaacaccatctactacgccgacagcgtgaagggccgctttaccatttcccgcgacaacgcaaagaactcgctgtaccttcagatgaattccctgcgggctgaagataccgcggtgtactattgcgcccggtccactatggtccgggaggactactggggacagggcacactcgtgaccgtgtccagcgcgagcgggggtggaggcagcggtggacgcgcctccggcggcggcggttcagacatcgtgctgactcagtcgcccctgtcgctgccggtcaccctgggccaaccggcctcaattagctgcaagtcctcggagagcctggtgcacaactcaggaaagacttacctgaactggttccatcagcggcctggacagtccccacggaggctcatctatgaagtgtccaacagggattcgggggtgcccgaccgcttcactggctccgggtccggcaccgacttcaccttgaaaatctccagagtggaagccgaggacgtgggcgtgtactactgtatgcagggtacccactggcctggaacctttggacaaggaactaagctcgagattaag

SEQ ID NO: 1468 - protein, 117 aa, Artificial Sequence
  source: /note="Description of Artificial Sequence: Synthetic polypeptide"
QVQLVQSGGGLVKPGGSLRLSCAASGFTFSDYYMSWIRQAPGKGLEWVSYISSSGNTIYYADSVKGRFTISRDNAKNSLYLQMNSLRAEDTAVYYCARSTMVREDYWGQGTLVTVSS

SEQ ID NO: 1469 - protein, 112 aa, Artificial Sequence
  source: /note="Description of Artificial Sequence: Synthetic polypeptide"
DIVLTQSPLSLPVTLGQPASISCKSSESLVHNSGKTYLNWFHQRPGQSPRRLIYEVSNRDSGVPDRFTGSGSGTDFTLKISRVEAEDVGVYYCMQGTHWPGTFGQGTKLEIK

SEQ ID NO: 1470 - protein, 490 aa, Artificial Sequence
  source: /note="Description of Artificial Sequence: Synthetic polypeptide"
MALPVTALLLPLALLLHAARPQVQLVQSGGGLVKPGGSLRLSCAASGFTFSDYYMSWIRQAPGKGLEWVSYISSSGNTIYYADSVKGRFTISRDNAKNSLYLQMNSLRAEDTAVYYCARSTMVREDYWGQGTLVTVSSASGGGGSGGRASGGGGSDIVLTQSPLSLPVTLGQPASISCKSSESLVHNSGKTYLNWFHQRPGQSPRRLIYEVSNRDSGVPDRFTGSGSGTDFTLKISRVEAEDVGVYYCMQGTHWPGTFGQGTKLEIKTTTPAPRPPTPAPTIASQPLSLRPEACRPAAGGAVHTRGLDFACDIYIWAPLAGTCGVLLLSLVITLYCKRGRKKLLYIFKQPFMRPVQTTQEEDGCSCRFPEEEEGGCELRVKFSRSADAPAYKQGQNQLYNELNLGRREEYDVLDKRRGRDPEMGGKPRRKNPQEGLYNELQKDKMAEAYSEIGMKGERRRGKGHDGLYQGLSTATKDTYDALHMQALPPR

SEQ ID NO: 1471 - DNA, 1470 bp, Artificial Sequence
  source: /note="Description of Artificial Sequence: Synthetic polynucleotide"
atggccctccctgtcaccgccctgctgcttccgctggctcttctgctccacgccgctcggccccaagtgcaactggtgcaaagcggaggaggattggtcaaacccggaggaagcctgagactgtcatgcgcggcctctggattcaccttctccgattactacatgtcatggatcagacaggccccggggaagggcctcgaatgggtgtcctacatctcgtcctccgggaacaccatctactacgccgacagcgtgaagggccgctttaccatttcccgcgacaacgcaaagaactcgctgtaccttcagatgaattccctgcgggctgaagataccgcggtgtactattgcgcccggtccactatggtccgggaggactactggggacagggcacactcgtgaccgtgtccagcgcgagcgggggtggaggcagcggtggacgcgcctccggcggcggcggttcagacatcgtgctgactcagtcgcccctgtcgctgccggtcaccctgggccaaccggcctcaattagctgcaagtcctcggagagcctggtgcacaactcaggaaagacttacctgaactggttccatcagcggcctggacagtccccacggaggctcatctatgaagtgtccaacagggattcgggggtgcccgaccgcttcactggctccgggtccggcaccgacttcaccttgaaaatctccagagtggaagccgaggacgtgggcgtgtactactgtatgcagggtacccactggcctggaacctttggacaaggaactaagctcgagattaagaccactaccccagcaccgaggccacccaccccggctcctaccatcgcctcccagcctctgtccctgcgtccggaggcatgtagacccgcagctggtggggccgtgcatacccggggtcttgacttcgcctgcgatatctacatttgggcccctctggctggtacttgcggggtcctgctgctttcactcgtgatcactctttactgtaagcgcggtcggaagaagctgctgtacatctttaagcaacccttcatgaggcctgtgcagactactcaagaggaggacggctgttcatgccggttcccagaggaggaggaaggcggctgcgaactgcgcgtgaaattcagccgcagcgcagatgctccagcctacaagcaggggcagaaccagctctacaacgaactcaatcttggtcggagagaggagtacgacgtgctggacaagcggagaggacgggacccagaaatgggcgggaagccgcgcagaaagaatccccaagagggcctgtacaacgagctccaaaaggataagatggcagaagcctatagcgagattggtatgaaaggggaacgcagaagaggcaaaggccacgacggactgtaccagggactcagcaccgccaccaaggacacctatgacgctcttcacatgcaggccctgccgcctcgg

SEQ ID NO: 1472 - protein, 239 aa, Artificial Sequence
  source: /note="Description of Artificial Sequence: Synthetic polypeptide"
QVQLVESGGGLVQPGGSLRLSCAVSGFALSNHGMSWVRRAPGKGLEWVSGIVYSGSTYYAASVKGRFTISRDNSRNTLYLQMNSLRPEDTAIYYCSAHGGESDVWGQGTTVTVSSASGGGGSGGRASGGGGSDIRLTQSPSPLSASVGDRVTITCQASEDINKFLNWYHQTPGKAPKLLIYDASTLQTGVPSRFSGSGSGTDFTLTINSLQPEDIGTYYCQQYESLPLTFGGGTKVEIK

SEQ ID NO: 1473 - DNA, 717 bp, Artificial Sequence
  source: /note="Description of Artificial Sequence: Synthetic polynucleotide"
caagtgcaactcgtggaatctggtggaggactcgtgcaacccggtggaagccttaggctgtcgtgcgccgtcagcgggtttgctctgagcaaccatggaatgtcctgggtccgccgggcaccgggaaaagggctggaatgggtgtccggcatcgtgtacagcgggtcaacctattacgccgcgtccgtgaagggcagattcactatctcaagagacaacagccggaacaccctgtacttgcaaatgaattccctgcgccccgaggacaccgccatctactactgctccgcccacggaggagagtcggacgtgtggggccagggaacgactgtgactgtgtccagcgcatcaggagggggtggttcgggcggccgggcctcggggggaggaggttccgacattcggctgacccagtccccgtccccactgtcggcctccgtcggcgaccgcgtgaccatcacttgtcaggcgtccgaggacattaacaagttcctgaactggtaccaccagacccctggaaaggcccccaagctgctgatctacgatgcctcgacccttcaaactggagtgcctagccggttctccgggtccggctccggcactgatttcactctgaccatcaactcattgcagccggaagatatcgggacctactattgccagcagtacgaatccctcccgctcacattcggcgggggaaccaaggtcgagattaag

SEQ ID NO: 1474 - protein, 115 aa, Artificial Sequence
  source: /note="Description of Artificial Sequence: Synthetic polypeptide"
QVQLVESGGGLVQPGGSLRLSCAVSGFALSNHGMSWVRRAPGKGLEWVSGIVYSGSTYYAASVKGRFTISRDNSRNTLYLQMNSLRPEDTAIYYCSAHGGESDVWGQGTTVTVSS

SEQ ID NO: 1475 - protein, 107 aa, Artificial Sequence
  source: /note="Description of Artificial Sequence: Synthetic polypeptide"
DIRLTQSPSPLSASVGDRVTITCQASEDINKFLNWYHQTPGKAPKLLIYDASTLQTGVPSRFSGSGSGTDFTLTINSLQPEDIGTYYCQQYESLPLTFGGGTKVEIK

SEQ ID NO: 1476 - protein, 483 aa, Artificial Sequence
  source: /note="Description of Artificial Sequence: Synthetic polypeptide"
MALPVTALLLPLALLLHAARPQVQLVESGGGLVQPGGSLRLSCAVSGFALSNHGMSWVRRAPGKGLEWVSGIVYSGSTYYAASVKGRFTISRDNSRNTLYLQMNSLRPEDTAIYYCSAHGGESDVWGQGTTVTVSSASGGGGSGGRASGGGGSDIRLTQSPSPLSASVGDRVTITCQASEDINKFLNWYHQTPGKAPKLLIYDASTLQTGVPSRFSGSGSGTDFTLTINSLQPEDIGTYYCQQYESLPLTFGGGTKVEIKTTTPAPRPPTPAPTIASQPLSLRPEACRPAAGGAVHTRGLDFACDIYIWAPLAGTCGVLLLSLVITLYCKRGRKKLLYIFKQPFMRPVQTTQEEDGCSCRFPEEEEGGCELRVKFSRSADAPAYKQGQNQLYNELNLGRREEYDVLDKRRGRDPEMGGKPRRKNPQEGLYNELQKDKMAEAYSEIGMKGERRRGKGHDGLYQGLSTATKDTYDALHMQALPPR

SEQ ID NO: 1477 - DNA, 1449 bp, Artificial Sequence
  source: /note="Description of Artificial Sequence: Synthetic polynucleotide"
atggccctccctgtcaccgccctgctgcttccgctggctcttctgctccacgccgctcggccccaagtgcaactcgtggaatctggtggaggactcgtgcaacccggtggaagccttaggctgtcgtgcgccgtcagcgggtttgctctgagcaaccatggaatgtcctgggtccgccgggcaccgggaaaagggctggaatgggtgtccggcatcgtgtacagcgggtcaacctattacgccgcgtccgtgaagggcagattcactatctcaagagacaacagccggaacaccctgtacttgcaaatgaattccctgcgccccgaggacaccgccatctactactgctccgcccacggaggagagtcggacgtgtggggccagggaacgactgtgactgtgtccagcgcatcaggagggggtggttcgggcggccgggcctcggggggaggaggttccgacattcggctgacccagtccccgtccccactgtcggcctccgtcggcgaccgcgtgaccatcacttgtcaggcgtccgaggacattaacaagttcctgaactggtaccaccagacccctggaaaggcccccaagctgctgatctacgatgcctcgacccttcaaactggagtgcctagccggttctccgggtccggctccggcactgatttcactctgaccatcaactcattgcagccggaagatatcgggacctactattgccagcagtacgaatccctcccgctcacattcggcgggggaaccaaggtcgagattaagaccactaccccagcaccgaggccacccaccccggctcctaccatcgcctcccagcctctgtccctgcgtccggaggcatgtagacccgcagctggtggggccgtgcatacccggggtcttgacttcgcctgcgatatctacatttgggcccctctggctggtacttgcggggtcctgctgctttcactcgtgatcactctttactgtaagcgcggtcggaagaagctgctgtacatctttaagcaacccttcatgaggcctgtgcagactactcaagaggaggacggctgttcatgccggttcccagaggaggaggaaggcggctgcgaactgcgcgtgaaattcagccgcagcgcagatgctccagcctacaagcaggggcagaaccagctctacaacgaactcaatcttggtcggagagaggagtacgacgtgctggacaagcggagaggacgggacccagaaatgggcgggaagccgcgcagaaagaatccccaagagggcctgtacaacgagctccaaaaggataagatggcagaagcctatagcgagattggtatgaaaggggaacgcagaagaggcaaaggccacgacggactgtaccagggactcagcaccgccaccaaggacacctatgacgctcttcacatgcaggccctgccgcctcgg

SEQ ID NO: 1478 - protein, 240 aa, Artificial Sequence
  source: /note="Description of Artificial Sequence: Synthetic polypeptide"
EVQLVETGGGLVQPGGSLRLSCAVSGFALSNHGMSWVRRAPGKGLEWVSGIVYSGSTYYAASVKGRFTISRDNSRNTLYLQMNSLRPEDTAIYYCSAHGGESDVWGQGTTVTVSSASGGGGSGGRASGGGGSETTLTQSPATLSVSPGERATLSCRASQSVGSNLAWYQQKPGQGPRLLIYGASTRATGIPARFSGSGSGTEFTLTISSLQPEDFAVYYCQQYNDWLPVTFGQGTKVEIK

SEQ ID NO: 1479 - skipped

SEQ ID NO: 1480 - DNA, 720 bp, Artificial Sequence
  source: /note="Description of Artificial Sequence: Synthetic polynucleotide"
gaagtgcaattggtggaaactggaggaggacttgtgcaacctggaggatcattgcggctctcatgcgctgtctccggcttcgccctgtcaaatcacgggatgtcgtgggtcagacgggccccgggaaagggtctggaatgggtgtcggggattgtgtacagcggctccacctactacgccgcttcggtcaagggccgcttcactatttcacgggacaacagccgcaacaccctctatctgcaaatgaactctctccgcccggaggataccgccatctactactgctccgcacacggcggcgaatccgacgtgtggggacagggaaccactgtcaccgtgtcgtccgcatccggtggcggaggatcgggtggccgggcctccgggggcggcggcagcgagactaccctgacccagtcccctgccactctgtccgtgagcccgggagagagagccacccttagctgccgggccagccagagcgtgggctccaacctggcctggtaccagcagaagccaggacagggtcccaggctgctgatctacggagcctccactcgcgcgaccggcatccccgcgaggttctccgggtcgggttccgggaccgagttcaccctgaccatctcctccctccaaccggaggacttcgcggtgtactactgtcagcagtacaacgattggctgcccgtgacatttggacaggggacgaaggtggaaatcaaa

SEQ ID NO: 1481 - protein, 115 aa, Artificial Sequence; identical to SEQ ID NO: 1450
  source: /note="Description of Artificial Sequence: Synthetic polypeptide"

SEQ ID NO: 1482 - protein, 108 aa, Artificial Sequence
  source: /note="Description of Artificial Sequence: Synthetic polypeptide"
ETTLTQSPATLSVSPGERATLSCRASQSVGSNLAWYQQKPGQGPRLLIYGASTRATGIPARFSGSGSGTEFTLTISSLQPEDFAVYYCQQYNDWLPVTFGQGTKVEIK

SEQ ID NO: 1483 - protein, 484 aa, Artificial Sequence
  source: /note="Description of Artificial Sequence: Synthetic polypeptide"
MALPVTALLLPLALLLHAARPEVQLVETGGGLVQPGGSLRLSCAVSGFALSNHGMSWVRRAPGKGLEWVSGIVYSGSTYYAASVKGRFTISRDNSRNTLYLQMNSLRPEDTAIYYCSAHGGESDVWGQGTTVTVSSASGGGGSGGRASGGGGSETTLTQSPATLSVSPGERATLSCRASQSVGSNLAWYQQKPGQGPRLLIYGASTRATGIPARFSGSGSGTEFTLTISSLQPEDFAVYYCQQYNDWLPVTFGQGTKVEIKTTTPAPRPPTPAPTIASQPLSLRPEACRPAAGGAVHTRGLDFACDIYIWAPLAGTCGVLLLSLVITLYCKRGRKKLLYIFKQPFMRPVQTTQEEDGCSCRFPEEEEGGCELRVKFSRSADAPAYKQGQNQLYNELNLGRREEYDVLDKRRGRDPEMGGKPRRKNPQEGLYNELQKDKMAEAYSEIGMKGERRRGKGHDGLYQGLSTATKDTYDALHMQALPPR

SEQ ID NO: 1484 - DNA, 1452 bp, Artificial Sequence
  source: /note="Description of Artificial Sequence: Synthetic polynucleotide"
atggccctccctgtcaccgccctgctgcttccgctggctcttctgctccacgccgctcggcccgaagtgcaattggtggaaactggaggaggacttgtgcaacctggaggatcattgcggctctcatgcgctgtctccggcttcgccctgtcaaatcacgggatgtcgtgggtcagacgggccccgggaaagggtctggaatgggtgtcggggattgtgtacagcggctccacctactacgccgcttcggtcaagggccgcttcactatttcacgggacaacagccgcaacaccctctatctgcaaatgaactctctccgcccggaggataccgccatctactactgctccgcacacggcggcgaatccgacgtgtggggacagggaaccactgtcaccgtgtcgtccgcatccggtggcggaggatcgggtggccgggcctccgggggcggcggcagcgagactaccctgacccagtcccctgccactctgtccgtgagcccgggagagagagccacccttagctgccgggccagccagagcgtgggctccaacctggcctggtaccagcagaagccaggacagggtcccaggctgctgatctacggagcctccactcgcgcgaccggcatccccgcgaggttctccgggtcgggttccgggaccgagttcaccctgaccatctcctccctccaaccggaggacttcgcggtgtactactgtcagcagtacaacgattggctgcccgtgacatttggacaggggacgaaggtggaaatcaaaaccactaccccagcaccgaggccacccaccccggctcctaccatcgcctcccagcctctgtccctgcgtccggaggcatgtagacccgcagctggtggggccgtgcatacccggggtcttgacttcgcctgcgatatctacatttgggcccctctggctggtacttgcggggtcctgctgctttcactcgtgatcactctttactgtaagcgcggtcggaagaagctgctgtacatctttaagcaacccttcatgaggcctgtgcagactactcaagaggaggacggctgttcatgccggttcccagaggaggaggaaggcggctgcgaactgcgcgtgaaattcagccgcagcgcagatgctccagcctacaagcaggggcagaaccagctctacaacgaactcaatcttggtcggagagaggagtacgacgtgctggacaagcggagaggacgggacccagaaatgggcgggaagccgcgcagaaagaatccccaagagggcctgtacaacgagctccaaaaggataagatggcagaagcctatagcgagattggtatgaaaggggaacgcagaagaggcaaaggccacgacggactgtaccagggactcagcaccgccaccaaggacacctatgacgctcttcacatgcaggccctgccgcctcgg

SEQ ID NO: 1485 - protein, 241 aa, Artificial Sequence
  source: /note="Description of Artificial Sequence: Synthetic polypeptide"
EVQLVESGGGLVQPGGSLRLSCAVSGFALSNHGMSWVRRAPGKGLEWVSGIVYSGSTYYAASVKGRFTISRDNSRNTLYLQMNSLRPEDTAIYYCSAHGGESDVWGQGTTVTVSSASGGGGSGGRASGGGGSEIVLTQSPGTLSLSPGERATLSCRASQSIGSSSLAWYQQKPGQAPRLLMYGASSRASGIPDRFSGSGSGTDFTLTISRLEPEDFAVYYCQQYAGSPPFTFGQGTKVEIK

SEQ ID NO: 1486 - DNA, 723 bp, Artificial Sequence
  source: /note="Description of Artificial Sequence: Synthetic polynucleotide"
gaagtgcaattggtggaatctggtggaggacttgtgcaacctggaggatcactgagactgtcatgcgcggtgtccggttttgccctgagcaatcatgggatgtcgtgggtccggcgcgcccccggaaagggtctggaatgggtgtcgggtatcgtctactccgggagcacttactacgccgcgagcgtgaagggccgcttcaccatttcccgcgataactcccgcaacaccctgtacttgcaaatgaactcgctccggcctgaggacactgccatctactactgctccgcacacggaggagaatccgacgtgtggggccagggaactaccgtgaccgtcagcagcgcctccggcggcgggggctcaggcggacgggctagcggcggcggtggctccgagatcgtgctgacccagtcgcctggcactctctcgctgagccccggggaaagggcaaccctgtcctgtcgggccagccagtccattggatcatcctccctcgcctggtatcagcagaaaccgggacaggctccgcggctgcttatgtatggggccagctcaagagcctccggcattcccgaccggttctccgggtccggttccggcaccgatttcaccctgactatctcgaggctggagccagaggacttcgccgtgtactactgccagcagtacgcggggtccccgccgttcacgttcggacagggaaccaaggtcgagatcaag

SEQ ID NO: 1487 - protein, 115 aa, Artificial Sequence; identical to SEQ ID NO: 1402
  source: /note="Description of Artificial Sequence: Synthetic polypeptide"

SEQ ID NO: 1488 - protein, 109 aa, Artificial Sequence
  source: /note="Description of Artificial Sequence: Synthetic polypeptide"
EIVLTQSPGTLSLSPGERATLSCRASQSIGSSSLAWYQQKPGQAPRLLMYGASSRASGIPDRFSGSGSGTDFTLTISRLEPEDFAVYYCQQYAGSPPFTFGQGTKVEIK

SEQ ID NO: 1489 - protein, 485 aa, Artificial Sequence
  source: /note="Description of Artificial Sequence: Synthetic polypeptide"
MALPVTALLLPLALLLHAARPEVQLVESGGGLVQPGGSLRLSCAVSGFALSNHGMSWVRRAPGKGLEWVSGIVYSGSTYYAASVKGRFTISRDNSRNTLYLQMNSLRPEDTAIYYCSAHGGESDVWGQGTTVTVSSASGGGGSGGRASGGGGSEIVLTQSPGTLSLSPGERATLSCRASQSIGSSSLAWYQQKPGQAPRLLMYGASSRASGIPDRFSGSGSGTDFTLTISRLEPEDFAVYYCQQYAGSPPFTFGQGTKVEIKTTTPAPRPPTPAPTIASQPLSLRPEACRPAAGGAVHTRGLDFACDIYIWAPLAGTCGVLLLSLVITLYCKRGRKKLLYIFKQPFMRPVQTTQEEDGCSCRFPEEEEGGCELRVKFSRSADAPAYKQGQNQLYNELNLGRREEYDVLDKRRGRDPEMGGKPRRKNPQEGLYNELQKDKMAEAYSEIGMKGERRRGKGHDGLYQGLSTATKDTYDALHMQALPPR

SEQ ID NO: 1490 - DNA, 1455 bp, Artificial Sequence
  source: /note="Description of Artificial Sequence: Synthetic polynucleotide"
atggccctccctgtcaccgccctgctgcttccgctggctcttctgctccacgccgctcggcccgaagtgcaattggtggaatctggtggaggacttgtgcaacctggaggatcactgagactgtcatgcgcggtgtccggttttgccctgagcaatcatgggatgtcgtgggtccggcgcgcccccggaaagggtctggaatgggtgtcgggtatcgtctactccgggagcacttactacgccgcgagcgtgaagggccgcttcaccatttcccgcgataactcccgcaacaccctgtacttgcaaatgaactcgctccggcctgaggacactgccatctactactgctccgcacacggaggagaatccgacgtgtggggccagggaactaccgtgaccgtcagcagcgcctccggcggcgggggctcaggcggacgggctagcggcggcggtggctccgagatcgtgctgacccagtcgcctggcactctctcgctgagccccggggaaagggcaaccctgtcctgtcgggccagccagtccattggatcatcctccctcgcctggtatcagcagaaaccgggacaggctccgcggctgcttatgtatggggccagctcaagagcctccggcattcccgaccggttctccgggtccggttccggcaccgatttcaccctgactatctcgaggctggagccagaggacttcgccgtgtactactgccagcagtacgcggggtccccgccgttcacgttcggacagggaaccaaggtcgagatcaagaccactaccccagcaccgaggccacccaccccggctcctaccatcgcctcccagcctctgtccctgcgtccggaggcatgtagacccgcagctggtggggccgtgcatacccggggtcttgacttcgcctgcgatatctacatttgggcccctctggctggtacttgcggggtcctgctgctttcactcgtgatcactctttactgtaagcgcggtcggaagaagctgctgtacatctttaagcaacccttcatgaggcctgtgcagactactcaagaggaggacggctgttcatgccggttcccagaggaggaggaaggcggctgcgaactgcgcgtgaaattcagccgcagcgcagatgctccagcctacaagcaggggcagaaccagctctacaacgaactcaatcttggtcggagagaggagtacgacgtgctggacaagcggagaggacgggacccagaaatgggcgggaagccgcgcagaaagaatccccaagagggcctgtacaacgagctccaaaaggataagatggcagaagcctatagcgagattggtatgaaaggggaacgcagaagaggcaaaggccacgacggactgtaccagggactcagcaccgccaccaaggacacctatgacgctcttcacatgcaggccctgccgcctcgg

SEQ ID NO: 1491 - protein, 243 aa, Artificial Sequence
  source: /note="Description of Artificial Sequence: Synthetic polypeptide"
QVQLQESGPGLVKPSETLSLTCTVSGGSISSSYYYWGWIRQPPGKGLEWIGSIYYSGSAYYNPSLKSRVTISVDTSKNQFSLRLSSVTAADTAVYYCARHWQEWPDAFDIWGQGTMVTVSSGGGGSGGGGSGGGGSETTLTQSPAFMSATPGDKVIISCKASQDIDDAMNWYQQKPGEAPLFIIQSATSPVPGIPPRFSGSGFGTDFSLTINNIESEDAAYYFCLQHDNFPLTFGQGTKLEIK

SEQ ID NO: 1492 - DNA, 729 bp, Artificial Sequence
  source: /note="Description of Artificial Sequence: Synthetic polynucleotide"
caagtgcagcttcaggaaagcggaccgggcctggtcaagccatccgaaactctctccctgacttgcactgtgtctggcggttccatctcatcgtcgtactactactggggctggattaggcagccgcccggaaagggactggagtggatcggaagcatctactattccggctcggcgtactacaaccctagcctcaagtcgagagtgaccatctccgtggatacctccaagaaccagttttccctgcgcctgagctccgtgaccgccgctgacaccgccgtgtactactgtgctcggcattggcaggaatggcccgatgccttcgacatttggggccagggcactatggtcactgtgtcatccgggggtggaggcagcgggggaggagggtccggggggggaggttcagagacaaccttgacccagtcacccgcattcatgtccgccactccgggagacaaggtcatcatctcgtgcaaagcgtcccaggatatcgacgatgccatgaattggtaccagcagaagcctggcgaagcgccgctgttcattatccaatccgcaacctcgcccgtgcctggaatcccaccgcggttcagcggcagcggtttcggaaccgacttttccctgaccattaacaacattgagtccgaggacgccgcctactacttctgcctgcaacacgacaacttccctctcacgttcggccagggaaccaagctggaaatcaag

SEQ ID NO: 1493 - protein, 121 aa, Artificial Sequence
  source: /note="Description of Artificial Sequence: Synthetic polypeptide"
QVQLQESGPGLVKPSETLSLTCTVSGGSISSSYYYWGWIRQPPGKGLEWIGSIYYSGSAYYNPSLKSRVTISVDTSKNQFSLRLSSVTAADTAVYYCARHWQEWPDAFDIWGQGTMVTVSS

SEQ ID NO: 1494 - protein, 107 aa, Artificial Sequence
  source: /note="Description of Artificial Sequence: Synthetic polypeptide"
ETTLTQSPAFMSATPGDKVIISCKASQDIDDAMNWYQQKPGEAPLFIIQSATSPVPGIPPRFSGSGFGTDFSLTINNIESEDAAYYFCLQHDNFPLTFGQGTKLEIK

SEQ ID NO: 1495 - protein, 487 aa, Artificial Sequence
  source: /note="Description of Artificial Sequence: Synthetic polypeptide"
MALPVTALLLPLALLLHAARPQVQLQESGPGLVKPSETLSLTCTVSGGSISSSYYYWGWIRQPPGKGLEWIGSIYYSGSAYYNPSLKSRVTISVDTSKNQFSLRLSSVTAADTAVYYCARHWQEWPDAFDIWGQGTMVTVSSGGGGSGGGGSGGGGSETTLTQSPAFMSATPGDKVIISCKASQDIDDAMNWYQQKPGEAPLFIIQSATSPVPGIPPRFSGSGFGTDFSLTINNIESEDAAYYFCLQHDNFPLTFGQGTKLEIKTTTPAPRPPTPAPTIASQPLSLRPEACRPAAGGAVHTRGLDFACDIYIWAPLAGTCGVLLLSLVITLYCKRGRKKLLYIFKQPFMRPVQTTQEEDGCSCRFPEEEEGGCELRVKFSRSADAPAYKQGQNQLYNELNLGRREEYDVLDKRRGRDPEMGGKPRRKNPQEGLYNELQKDKMAEAYSEIGMKGERRRGKGHDGLYQGLSTATKDTYDALHMQALPPR

SEQ ID NO: 1496 - DNA, 1461 bp, Artificial Sequence
  source: /note="Description of Artificial Sequence: Synthetic polynucleotide"
atggccctccctgtcaccgccctgctgcttccgctggctcttctgctccacgccgctcggccccaagtgcagcttcaggaaagcggaccgggcctggtcaagccatccgaaactctctccctgacttgcactgtgtctggcggttccatctcatcgtcgtactactactggggctggattaggcagccgcccggaaagggactggagtggatcggaagcatctactattccggctcggcgtactacaaccctagcctcaagtcgagagtgaccatctccgtggatacctccaagaaccagttttccctgcgcctgagctccgtgaccgccgctgacaccgccgtgtactactgtgctcggcattggcaggaatggcccgatgccttcgacatttggggccagggcactatggtcactgtgtcatccgggggtggaggcagcgggggaggagggtccggggggggaggttcagagacaaccttgacccagtcacccgcattcatgtccgccactccgggagacaaggtcatcatctcgtgcaaagcgtcccaggatatcgacgatgccatgaattggtaccagcagaagcctggcgaagcgccgctgttcattatccaatccgcaacctcgcccgtgcctggaatcccaccgcggttcagcggcagcggtttcggaaccgacttttccctgaccattaacaacattgagtccgaggacgccgcctactacttctgcctgcaacacgacaacttccctctcacgttcggccagggaaccaagctggaaatcaagaccactaccccagcaccgaggccacccaccccggctcctaccatcgcctcccagcctctgtccctgcgtccggaggcatgtagacccgcagctggtggggccgtgcatacccggggtcttgacttcgcctgcgatatctacatttgggcccctctggctggtacttgcggggtcctgctgctttcactcgtgatcactctttactgtaagcgcggtcggaagaagctgctgtacatctttaagcaacccttcatgaggcctgtgcagactactcaagaggaggacggctgttcatgccggttcccagaggaggaggaaggcggctgcgaactgcgcgtgaaattcagccgcagcgcagatgctccagcctacaagcaggggcagaaccagctctacaacgaactcaatcttggtcggagagaggagtacgacgtgctggacaagcggagaggacgggacccagaaatgggcgggaagccgcgcagaaagaatccccaagagggcctgtacaacgagctccaaaaggataagatggcagaagcctatagcgagattggtatgaaaggggaacgcagaagaggcaaaggccacgacggactgtaccagggactcagcaccgccaccaaggacacctatgacgctcttcacatgcaggccctgccgcctcgg

SEQ ID NO: 1497 - protein, 244 aa, Artificial Sequence
  source: /note="Description of Artificial Sequence: Synthetic polypeptide"
VNLRESGPALVKPTQTLTLTCTFSGFSLRTSGMCVSWIRQPPGKALEWLARIDWDEDKFYSTSLKTRLTISKDTSDNQVVLRMTNMDPADTATYYCARSGAGGTSATAFDIWGPGTMVTVSSGGGGSGGGGSGGGGSDIQMTQSPSSLSASVGDRVTITCRASQDIYNNLAWFQLKPGSAPRSLMYAANKSQSGVPSRFSGSASGTDFTLTISSLQPEDFATYYCQHYYRFPYSFGQGTKLEIK

SEQ ID NO: 1498 - DNA, 735 bp, Artificial Sequence
  source: /note="Description of Artificial Sequence: Synthetic polynucleotide"
caagtcaatctgcgcgaatccggccccgccttggtcaagcctacccagaccctcactctgacctgtactttctccggcttctccctgcggacttccgggatgtgcgtgtcctggatcagacagcctccgggaaaggccctggagtggctcgctcgcattgactgggatgaggacaagttctactccacctcactcaagaccaggctgaccatcagcaaagatacctctgacaaccaagtggtgctccgcatgaccaacatggacccagccgacactgccacttactactgcgcgaggagcggagcgggcggaacctccgccaccgccttcgatatttggggcccgggtaccatggtcaccgtgtcaagcggaggaggggggtccgggggcggcggttccgggggaggcggatcggacattcagatgactcagtcaccatcgtccctgagcgctagcgtgggcgacagagtgacaatcacttgccgggcatcccaggacatctataacaaccttgcgtggttccagctgaagcctggttccgcaccgcggtcacttatgtacgccgccaacaagagccagtcgggagtgccgtcccggttttccggttcggcctcgggaactgacttcaccctgacgatctccagcctgcaacccgaggatttcgccacctactactgccagcactactaccgctttccctactcgttcggacagggaaccaagctggaaatcaag

SEQ ID NO: 1499 - protein, 123 aa, Artificial Sequence
  source: /note="Description of Artificial Sequence: Synthetic polypeptide"
QVNLRESGPALVKPTQTLTLTCTFSGFSLRTSGMCVSWIRQPPGKALEWLARIDWDEDKFYSTSLKTRLTISKDTSDNQVVLRMTNMDPADTATYYCARSGAGGTSATAFDIWGPGTMVTVSS

SEQ ID NO: 1500 - protein, 107 aa, Artificial Sequence
  source: /note="Description of Artificial Sequence: Synthetic polypeptide"
DIQMTQSPSSLSASVGDRVTITCRASQDIYNNLAWFQLKPGSAPRSLMYAANKSQSGVPSRFSGSASGTDFTLTISSLQPEDFATYYCQHYYRFPYSFGQGTKLEIK

SEQ ID NO: 1501 - protein, 489 aa, Artificial Sequence
  source: /note="Description of Artificial Sequence: Synthetic polypeptide"
MALPVTALLLPLALLLHAARPQVNLRESGPALVKPTQTLTLTCTFSGFSLRTSGMCVSWIRQPPGKALEWLARIDWDEDKFYSTSLKTRLTISKDTSDNQVVLRMTNMDPADTATYYCARSGAGGTSATAFDIWGPGTMVTVSSGGGGSGGGGSGGGGSDIQMTQSPSSLSASVGDRVTITCRASQDIYNNLAWFQLKPGSAPRSLMYAANKSQSGVPSRFSGSASGTDFTLTISSLQPEDFATYYCQHYYRFPYSFGQGTKLEIKTTTPAPRPPTPAPTIASQPLSLRPEACRPAAGGAVHTRGLDFACDIYIWAPLAGTCGVLLLSLVITLYCKRGRKKLLYIFKQPFMRPVQTTQEEDGCSCRFPEEEEGGCELRVKFSRSADAPAYKQGQNQLYNELNLGRREEYDVLDKRRGRDPEMGGKPRRKNPQEGLYNELQKDKMAEAYSEIGMKGERRRGKGHDGLYQGLSTATKDTYDALHMQALPPR

SEQ ID NO: 1502 - DNA, 1467 bp, Artificial Sequence
  source: /note="Description of Artificial Sequence: Synthetic polynucleotide"
atggccctccctgtcaccgccctgctgcttccgctggctcttctgctccacgccgctcggccccaagtcaatctgcgcgaatccggccccgccttggtcaagcctacccagaccctcactctgacctgtactttctccggcttctccctgcggacttccgggatgtgcgtgtcctggatcagacagcctccgggaaaggccctggagtggctcgctcgcattgactgggatgaggacaagttctactccacctcactcaagaccaggctgaccatcagcaaagatacctctgacaaccaagtggtgctccgcatgaccaacatggacccagccgacactgccacttactactgcgcgaggagcggagcgggcggaacctccgccaccgccttcgatatttggggcccgggtaccatggtcaccgtgtcaagcggaggaggggggtccgggggcggcggttccgggggaggcggatcggacattcagatgactcagtcaccatcgtccctgagcgctagcgtgggcgacagagtgacaatcacttgccgggcatcccaggacatctataacaaccttgcgtggttccagctgaagcctggttccgcaccgcggtcacttatgtacgccgccaacaagagccagtcgggagtgccgtcccggttttccggttcggcctcgggaactgacttcaccctgacgatctccagcctgcaacccgaggatttcgccacctactactgccagcactactaccgctttccctactcgttcggacagggaaccaagctggaaatcaagaccactaccccagcaccgaggccacccaccccggctcctaccatcgcctcccagcctctgtccctgcgtccggaggcatgtagacccgcagctggtggggccgtgcatacccggggtcttgacttcgcctgcgatatctacatttgggcccctctggctggtacttgcggggtcctgctgctttcactcgtgatcactctttactgtaagcgcggtcggaagaagctgctgtacatctttaagcaacccttcatgaggcctgtgcagactactcaagaggaggacggctgttcatgccggttcccagaggaggaggaaggcggctgcgaactgcgcgtgaaattcagccgcagcgcagatgctccagcctacaagcaggggcagaaccagctctacaacgaactcaatcttggtcggagagaggagtacgacgtgctggacaagcggagaggacgggacccagaaatgggcgggaagccgcgcagaaagaatccccaagagggcctgtacaacgagctccaaaaggataagatggcagaagcctatagcgagattggtatgaaaggggaacgcagaagaggcaaaggccacgacggactgtaccagggactcagcaccgccaccaaggacacctatgacgctcttcacatgcaggccctgccgcctcgg

SEQ ID NO: 1503 - protein, 246 aa, Artificial Sequence
  source: /note="Description of Artificial Sequence: Synthetic polypeptide"
EVQLVESGGGLVKPGGSLRLSCAASGFTFSSYSMNWVRQAPGKGLEWVSSISSSSSYIYYADSVKGRFTISRDNAKNSLYLQMNSLRAEDTAVYYCAKTIAAVYAFDIWGQGTTVTVSSGGGGSGGGGSGGGGSEIVLTQSPLSLPVTPEEPASISCRSSQSLLHSNGYNYLDWYLQKPGQSPQLLIYLGSNRASGVPDRFSGSGSGTDFTLKISRVEAEDVGVYYCMQALQTPYTFGQGTKLEIK

SEQ ID NO: 1504 - DNA, 738 bp, Artificial Sequence
  source: /note="Description of Artificial Sequence: Synthetic polynucleotide"
gaagtgcagcttgtcgaatccggggggggactggtcaagccgggcggatcactgagactgtcctgcgccgcgagcggcttcacgttctcctcctactccatgaactgggtccgccaagcccccgggaagggactggaatgggtgtcctctatctcctcgtcgtcgtcctacatctactacgccgactccgtgaagggaagattcaccatttcccgcgacaacgcaaagaactcactgtacttgcaaatgaactcactccgggccgaagatactgctgtgtactattgcgccaagactattgccgccgtctacgctttcgacatctggggccagggaaccaccgtgactgtgtcgtccggtggtggtggctcgggcggaggaggaagcggcggcggggggtccgagattgtgctgacccagtcgccactgagcctccctgtgacccccgaggaacccgccagcatcagctgccggtccagccagtccctgctccactccaacggatacaattacctcgattggtaccttcagaagcctggacaaagcccgcagctgctcatctacttgggatcaaaccgcgcgtcaggagtgcctgaccggttctccggctcgggcagcggtaccgatttcaccctgaaaatctccagggtggaggcagaggacgtgggagtgtattactgtatgcaggcgctgcagactccgtacacatttgggcagggcaccaagctggagatcaag

SEQ ID NO: 1505 - protein, 119 aa, Artificial Sequence
  source: /note="Description of Artificial Sequence: Synthetic polypeptide"
EVQLVESGGGLVKPGGSLRLSCAASGFTFSSYSMNWVRQAPGKGLEWVSSISSSSSYIYYADSVKGRFTISRDNAKNSLYLQMNSLRAEDTAVYYCAKTIAAVYAFDIWGQGTTVTVSS

SEQ ID NO: 1506 - protein, 112 aa, Artificial Sequence
  source: /note="Description of Artificial Sequence: Synthetic polypeptide"
EIVLTQSPLSLPVTPEEPASISCRSSQSLLHSNGYNYLDWYLQKPGQSPQLLIYLGSNRASGVPDRFSGSGSGTDFTLKISRVEAEDVGVYYCMQALQTPYTFGQGTKLEIK

SEQ ID NO: 1507 - protein, 490 aa, Artificial Sequence
  source: /note="Description of Artificial Sequence: Synthetic polypeptide"
MALPVTALLLPLALLLHAARPEVQLVESGGGLVKPGGSLRLSCAASGFTFSSYSMNWVRQAPGKGLEWVSSISSSSSYIYYADSVKGRFTISRDNAKNSLYLQMNSLRAEDTAVYYCAKTIAAVYAFDIWGQGTTVTVSSGGGGSGGGGSGGGGSEIVLTQSPLSLPVTPEEPASISCRSSQSLLHSNGYNYLDWYLQKPGQSPQLLIYLGSNRASGVPDRFSGSGSGTDFTLKISRVEAEDVGVYYCMQALQTPYTFGQGTKLEIKTTTPAPRPPTPAPTIASQPLSLRPEACRPAAGGAVHTRGLDFACDIYIWAPLAGTCGVLLLSLVITLYCKRGRKKLLYIFKQPFMRPVQTTQEEDGCSCRFPEEEEGGCELRVKFSRSADAPAYKQGQNQLYNELNLGRREEYDVLDKRRGRDPEMGGKPRRKNPQEGLYNELQKDKMAEAYSEIGMKGERRRGKGHDGLYQGLSTATKDTYDALHMQALPPR

SEQ ID NO: 1508 - DNA, 1470 bp, Artificial Sequence
  source: /note="Description of Artificial Sequence: Synthetic polynucleotide"
atggccctccctgtcaccgccctgctgcttccgctggctcttctgctccacgccgctcggcccgaagtgcagcttgtcgaatccggggggggactggtcaagccgggcggatcactgagactgtcctgcgccgcgagcggcttcacgttctcctcctactccatgaactgggtccgccaagcccccgggaagggactggaatgggtgtcctctatctcctcgtcgtcgtcctacatctactacgccgactccgtgaagggaagattcaccatttcccgcgacaacgcaaagaactcactgtacttgcaaatgaactcactccgggccgaagatactgctgtgtactattgcgccaagactattgccgccgtctacgctttcgacatctggggccagggaaccaccgtgactgtgtcgtccggtggtggtggctcgggcggaggaggaagcggcggcggggggtccgagattgtgctgacccagtcgccactgagcctccctgtgacccccgaggaacccgccagcatcagctgccggtccagccagtccctgctccactccaacggatacaattacctcgattggtaccttcagaagcctggacaaagcccgcagctgctcatctacttgggatcaaaccgcgcgtcaggagtgcctgaccggttctccggctcgggcagcggtaccgatttcaccctgaaaatctccagggtggaggcagaggacgtgggagtgtattactgtatgcaggcgctgcagactccgtacacatttgggcagggcaccaagctggagatcaagaccactaccccagcaccgaggccacccaccccggctcctaccatcgcctcccagcctctgtccctgcgtccggaggcatgtagacccgcagctggtggggccgtgcatacccggggtcttgacttcgcctgcgatatctacatttgggcccctctggctggtacttgcggggtcctgctgctttcactcgtgatcactctttactgtaagcgcggtcggaagaagctgctgtacatctttaagcaacccttcatgaggcctgtgcagactactcaagaggaggacggctgttcatgccggttcccagaggaggaggaaggcggctgcgaactgcgcgtgaaattcagccgcagcgcagatgctccagcctacaagcaggggcagaaccagctctacaacgaactcaatcttggtcggagagaggagtacgacgtgctggacaagcggagaggacgggacccagaaatgggcgggaagccgcgcagaaagaatccccaagagggcctgtacaacgagctccaaaaggataagatggcagaagcctatagcgagattggtatgaaaggggaacgcagaagaggcaaaggccacgacggactgtaccagggactcagcaccgccaccaaggacacctatgacgctcttcacatgcaggccctgccgcctcgg

SEQ ID NO: 1509 - protein, 240 aa, Artificial Sequence
  source: /note="Description of Artificial Sequence: Synthetic polypeptide"
EVQLVESGGGLVKPGGSLRLSCAASGFTFSDYYMSWIRQAPGKGLEWVSYISSSGSTIYYADSVKGRFTISRDNAKNSLYLQMNSLRAEDTAVYYCARDLRGAFDIWGQGTMVTVSSGGGGSGGGGSGGGGSSYVLTQSPSVSAAPGYTATISCGGNNIGTKSVHWYQQKPGQAPLLVIRDDSVRPSKIPGRFSGSNSGNMATLTISGVQAGDEADFYCQVWDSDSEHVVFGGGTKLTVL

SEQ ID NO: 1510 - DNA, 720 bp, Artificial Sequence
  source: /note="Description of Artificial Sequence: Synthetic polynucleotide"
gaagtccagctcgtggagtccggcggaggccttgtgaagcctggaggttcgctgagactgtcctgcgccgcctccggcttcaccttctccgactactacatgtcctggatcagacaggccccgggaaagggcctggaatgggtgtcctacatctcgtcatcgggcagcactatctactacgcggactcagtgaaggggcggttcaccatttcccgggataacgcgaagaactcgctgtatctgcaaatgaactcactgagggccgaggacaccgccgtgtactactgcgcccgcgatctccgcggggcatttgacatctggggacagggaaccatggtcacagtgtccagcggagggggaggatcgggtggcggaggttccgggggtggaggctcctcctacgtgctgactcagagcccaagcgtcagcgctgcgcccggttacacggcaaccatctcctgtggcggaaacaacattgggaccaagtctgtgcactggtatcagcagaagccgggccaagctcccctgttggtgatccgcgatgactccgtgcggcctagcaaaattccgggacggttctccggctccaacagcggcaatatggccactctcaccatctcgggagtgcaggccggagatgaagccgacttctactgccaagtctgggactcagactccgagcatgtggtgttcgggggcggaaccaagctgactgtgctc

SEQ ID NO: 1511 - protein, 117 aa, Artificial Sequence
  source: /note="Description of Artificial Sequence: Synthetic polypeptide"
EVQLVESGGGLVKPGGSLRLSCAASGFTFSDYYMSWIRQAPGKGLEWVSYISSSGSTIYYADSVKGRFTISRDNAKNSLYLQMNSLRAEDTAVYYCARDLRGAFDIWGQGTMVTVSS

SEQ ID NO: 1512 - protein, 108 aa, Artificial Sequence
  source: /note="Description of Artificial Sequence: Synthetic polypeptide"
SYVLTQSPSVSAAPGYTATISCGGNNIGTKSVHWYQQKPGQAPLLVIRDDSVRPSKIPGRFSGSNSGNMATLTISGVQAGDEADFYCQVWDSDSEHVVFGGGTKLTVL

SEQ ID NO: 1513 - protein, 484 aa, Artificial Sequence
  source: /note="Description of Artificial Sequence: Synthetic polypeptide"
MALPVTALLLPLALLLHAARPEVQLVESGGGLVKPGGSLRLSCAASGFTFSDYYMSWIRQAPGKGLEWVSYISSSGSTIYYADSVKGRFTISRDNAKNSLYLQMNSLRAEDTAVYYCARDLRGAFDIWGQGTMVTVSSGGGGSGGGGSGGGGSSYVLTQSPSVSAAPGYTATISCGGNNIGTKSVHWYQQKPGQAPLLVIRDDSVRPSKIPGRFSGSNSGNMATLTISGVQAGDEADFYCQVWDSDSEHVVFGGGTKLTVLTTTPAPRPPTPAPTIASQPLSLRPEACRPAAGGAVHTRGLDFACDIYIWAPLAGTCGVLLLSLVITLYCKRGRKKLLYIFKQPFMRPVQTTQEEDGCSCRFPEEEEGGCELRVKFSRSADAPAYKQGQNQLYNELNLGRREEYDVLDKRRGRDPEMGGKPRRKNPQEGLYNELQKDKMAEAYSEIGMKGERRRGKGHDGLYQGLSTATKDTYDALHMQALPPR

SEQ ID NO: 1514 - DNA, 1452 bp, Artificial Sequence
  source: /note="Description of Artificial Sequence: Synthetic polynucleotide"
atggccctccctgtcaccgccctgctgcttccgctggctcttctgctccacgccgctcggcccgaagtccagctcgtggagtccggcggaggccttgtgaagcctggaggttcgctgagactgtcctgcgccgcctccggcttcaccttctccgactactacatgtcctggatcagacaggccccgggaaagggcctggaatgggtgtcctacatctcgtcatcgggcagcactatctactacgcggactcagtgaaggggcggttcaccatttcccgggataacgcgaagaactcgctgtatctgcaaatgaactcactgagggccgaggacaccgccgtgtactactgcgcccgcgatctccgcggggcatttgacatctggggacagggaaccatggtcacagtgtccagcggagggggaggatcgggtggcggaggttccgggggtggaggctcctcctacgtgctgactcagagcccaagcgtcagcgctgcgcccggttacacggcaaccatctcctgtggcggaaacaacattgggaccaagtctgtgcactggtatcagcagaagccgggccaagctcccctgttggtgatccgcgatgactccgtgcggcctagcaaaattccgggacggttctccggctccaacagcggcaatatggccactctcaccatctcgggagtgcaggccggagatgaagccgacttctactgccaagtctgggactcagactccgagcatgtggtgttcgggggcggaaccaagctgactgtgctcaccactaccccagcaccgaggccacccaccccggctcctaccatcgcctcccagcctctgtccctgcgtccggaggcatgtagacccgcagctggtggggccgtgcatacccggggtcttgacttcgcctgcgatatctacatttgggcccctctggctggtacttgcggggtcctgctgctttcactcgtgatcactctttactgtaagcgcggtcggaagaagctgctgtacatctttaagcaacccttcatgaggcctgtgcagactactcaagaggaggacggctgttcatgccggttcccagaggaggaggaaggcggctgcgaactgcgcgtgaaattcagccgcagcgcagatgctccagcctacaagcaggggcagaaccagctctacaacgaactcaatcttggtcggagagaggagtacgacgtgctggacaagcggagaggacgggacccagaaatgggcgggaagccgcgcagaaagaatccccaagagggcctgtacaacgagctccaaaaggataagatggcagaagcctatagcgagattggtatgaaaggggaacgcagaagaggcaaaggccacgacggactgtaccagggactcagcaccgccaccaaggacacctatgacgctcttcacatgcaggccctgccgcctcgg

SEQ ID NO: 1515 - protein, 241 aa, Artificial Sequence
  source: /note="Description of Artificial Sequence: Synthetic polypeptide"
QVQLVQSGAEVKKPGASVKVSCKPSGYTVTSHYIHWVRRAPGQGLEWMGMINPSGGVTAYSQTLQGRVTMTSDTSSSTVYMELSSLRSEDTAMYYCAREGSGSGWYFDFWGRGTLVTVSSGGGGSGGGGSGGGGSSYVLTQPPSVSVSPGQTASITCSGDGLSKKYVSWYQQKAGQSPVVLISRDKERPSGIPDRFSGSNSADTATLTISGTQAMDEADYYCQAWDDTTVVFGGGTKLTVL

SEQ ID NO: 1516 - DNA, 723 bp, Artificial Sequence
  source: /note="Description of Artificial Sequence: Synthetic polynucleotide"
caagtgcagctggtgcagagcggggccgaagtcaagaagccgggagcctccgtgaaagtgtcctgcaagccttcgggatacaccgtgacctcccactacattcattgggtccgccgcgcccccggccaaggactcgagtggatgggcatgatcaaccctagcggcggagtgaccgcgtacagccagacgctgcagggacgcgtgactatgacctcggatacctcctcctccaccgtctatatggaactgtccagcctgcggtccgaggataccgccatgtactactgcgcccgggaaggatcaggctccgggtggtatttcgacttctggggaagaggcaccctcgtgactgtgtcatctgggggagggggttccggtggtggcggatcgggaggaggcggttcatcctacgtgctgacccagccaccctccgtgtccgtgagccccggccagactgcatcgattacatgtagcggcgacggcctctccaagaaatacgtgtcgtggtaccagcagaaggccggacagagcccggtggtgctgatctcaagagataaggagcggcctagcggaatcccggacaggttctcgggttccaactccgcggacactgctactctgaccatctcggggacccaggctatggacgaagccgattactactgccaagcctgggacgacactactgtcgtgtttggagggggcaccaagttgaccgtcctt

SEQ ID NO: 1517 - protein, 120 aa, Artificial Sequence
  source: /note="Description of Artificial Sequence: Synthetic polypeptide"
QVQLVQSGAEVKKPGASVKVSCKPSGYTVTSHYIHWVRRAPGQGLEWMGMINPSGGVTAYSQTLQGRVTMTSDTSSSTVYMELSSLRSEDTAMYYCAREGSGSGWYFDFWGRGTLVTVSS

SEQ ID NO: 1518 - protein, 106 aa, Artificial Sequence
  source: /note="Description of Artificial Sequence: Synthetic polypeptide"
SYVLTQPPSVSVSPGQTASITCSGDGLSKKYVSWYQQKAGQSPVVLISRDKERPSGIPDRFSGSNSADTATLTISGTQAMDEADYYCQAWDDTTVVFGGGTKLTVL

SEQ ID NO: 1519 - protein, 485 aa, Artificial Sequence
  source: /note="Description of Artificial Sequence: Synthetic polypeptide"
MALPVTALLLPLALLLHAARPQVQLVQSGAEVKKPGASVKVSCKPSGYTVTSHYIHWVRRAPGQGLEWMGMINPSGGVTAYSQTLQGRVTMTSDTSSSTVYMELSSLRSEDTAMYYCAREGSGSGWYFDFWGRGTLVTVSSGGGGSGGGGSGGGGSSYVLTQPPSVSVSPGQTASITCSGDGLSKKYVSWYQQKAGQSPVVLISRDKERPSGIPDRFSGSNSADTATLTISGTQAMDEADYYCQAWDDTTVVFGGGTKLTVLTTTPAPRPPTPAPTIASQPLSLRPEACRPAAGGAVHTRGLDFACDIYIWAPLAGTCGVLLLSLVITLYCKRGRKKLLYIFKQPFMRPVQTTQEEDGCSCRFPEEEEGGCELRVKFSRSADAPAYKQGQNQLYNELNLGRREEYDVLDKRRGRDPEMGGKPRRKNPQEGLYNELQKDKMAEAYSEIGMKGERRRGKGHDGLYQGLSTATKDTYDALHMQALPPR

SEQ ID NO: 1520 - DNA, 1455 bp, Artificial Sequence
  source: /note="Description of Artificial Sequence: Synthetic polynucleotide"
atggccctccctgtcaccgccctgctgcttccgctggctcttctgctccacgccgctcggccccaagtgcagctggtgcagagcggggccgaagtcaagaagccgggagcctccgtgaaagtgtcctgcaagccttcgggatacaccgtgacctcccactacattcattgggtccgccgcgcccccggccaaggactcgagtggatgggcatgatcaaccctagcggcggagtgaccgcgtacagccagacgctgcagggacgcgtgactatgacctcggatacctcctcctccaccgtctatatggaactgtccagcctgcggtccgaggataccgccatgtactactgcgcccgggaaggatcaggctccgggtggtatttcgacttctggggaagaggcaccctcgtgactgtgtcatctgggggagggggttccggtggtggcggatcgggaggaggcggttcatcctacgtgctgacccagccaccctccgtgtccgtgagccccggccagactgcatcgattacatgtagcggcgacggcctctccaagaaatacgtgtcgtggtaccagcagaaggccggacagagcccggtggtgctgatctcaagagataaggagcggcctagcggaatcccggacaggttctcgggttccaactccgcggacactgctactctgaccatctcggggacccaggctatggacgaagccgattactactgccaagcctgggacgacactactgtcgtgtttggagggggcaccaagttgaccgtccttaccactaccccagcaccgaggccacccaccccggctcctaccatcgcctcccagcctctgtccctgcgtccggaggcatgtagacccgcagctggtggggccgtgcatacccggggtcttgacttcgcctgcgatatctacatttgggcccctctggctggtacttgcggggtcctgctgctttcactcgtgatcactctttactgtaagcgcggtcggaagaagctgctgtacatctttaagcaacccttcatgaggcctgtgcagactactcaagaggaggacggctgttcatgccggttcccagaggaggaggaaggcggctgcgaactgcgcgtgaaattcagccgcagcgcagatgctccagcctacaagcaggggcagaaccagctctacaacgaactcaatcttggtcggagagaggagtacgacgtgctggacaagcggagaggacgggacccagaaatgggcgggaagccgcgcagaaagaatccccaagagggcctgtacaacgagctccaaaaggataagatggcagaagcctatagcgagattggtatgaaaggggaacgcagaagaggcaaaggccacgacggactgtaccagggactcagcaccgccaccaaggacacctatgacgctcttcacatgcaggccctgccgcctcgg

SEQ ID NO: 1521 - protein, 245 aa, Artificial Sequence
  source: /note="Description of Artificial Sequence: Synthetic polypeptide"
QVQLQESGPGLVKPSQTLSLTCTVSGGSISSGGYYWSWIRQHPGKGLEWIGYIYYSGSTYYNPSLKSRVTISVDTSKNQFSLKLSSVTAADTAVYYCARAGIAARLRGAFDIWGQGTMVTVSSGGGGSGGGGSGGGGSDIVMTQSPSSVSASVGDRVIITCRASQGIRNWLAWYQQKPGKAPNLLIYAASNLQSGVPSRFSGSGSGADFTLTISSLQPEDVATYYCQKYNSAPFTFGPGTKVDIK

SEQ ID NO: 1522 - DNA, 735 bp, Artificial Sequence
  source: /note="Description of Artificial Sequence: Synthetic polynucleotide"
caagtgcagcttcaggagagcggcccgggactcgtgaagccgtcccagaccctgtccctgacttgcaccgtgtcgggaggaagcatctcgagcggaggctactattggtcgtggattcggcagcaccctggaaagggcctggaatggatcggctacatctactactccggctcgacctactacaacccatcgctgaagtccagagtgacaatctcagtggacacgtccaagaatcagttcagcctgaagctctcttccgtgactgcggccgacaccgccgtgtactactgcgcacgcgctggaattgccgcccggctgaggggtgccttcgacatttggggacagggcaccatggtcaccgtgtcctccggcggcggaggttccgggggtggaggctcaggaggaggggggtccgacatcgtcatgactcagtcgccctcaagcgtcagcgcgtccgtcggggacagagtgatcatcacctgtcgggcgtcccagggaattcgcaactggctggcctggtatcagcagaagcccggaaaggcccccaacctgttgatctacgccgcctcaaacctccaatccggggtgccgagccgcttcagcggctccggttcgggtgccgatttcactctgaccatctcctccctgcaacctgaagatgtggctacctactactgccaaaagtacaactccgcaccttttactttcggaccggggaccaaagtggacattaag

SEQ ID NO: 1523 - protein, 123 aa, Artificial Sequence
  source: /note="Description of Artificial Sequence: Synthetic polypeptide"
QVQLQESGPGLVKPSQTLSLTCTVSGGSISSGGYYWSWIRQHPGKGLEWIGYIYYSGSTYYNPSLKSRVTISVDTSKNQFSLKLSSVTAADTAVYYCARAGIAARLRGAFDIWGQGTMVTVSS

SEQ ID NO: 1524 - protein, 107 aa, Artificial Sequence
  source: /note="Description of Artificial Sequence: Synthetic polypeptide"
DIVMTQSPSSVSASVGDRVIITCRASQGIRNWLAWYQQKPGKAPNLLIYAASNLQSGVPSRFSGSGSGADFTLTISSLQPEDVATYYCQKYNSAPFTFGPGTKVDIK

SEQ ID NO: 1525 - protein, 489 aa, Artificial Sequence
  source: /note="Description of Artificial Sequence: Synthetic polypeptide"
MALPVTALLLPLALLLHAARPQVQLQESGPGLVKPSQTLSLTCTVSGGSISSGGYYWSWIRQHPGKGLEWIGYIYYSGSTYYNPSLKSRVTISVDTSKNQFSLKLSSVTAADTAVYYCARAGIAARLRGAFDIWGQGTMVTVSSGGGGSGGGGSGGGGSDIVMTQSPSSVSASVGDRVIITCRASQGIRNWLAWYQQKPGKAPNLLIYAASNLQSGVPSRFSGSGSGADFTLTISSLQPEDVATYYCQKYNSAPFTFGPGTKVDIKTTTPAPRPPTPAPTIASQPLSLRPEACRPAAGGAVHTRGLDFACDIYIWAPLAGTCGVLLLSLVITLYCKRGRKKLLYIFKQPFMRPVQTTQEEDGCSCRFPEEEEGGCELRVKFSRSADAPAYKQGQNQLYNELNLGRREEYDVLDKRRGRDPEMGGKPRRKNPQEGLYNELQKDKMAEAYSEIGMKGERRRGKGHDGLYQGLSTATKDTYDALHMQALPPR

SEQ ID NO: 1526 - DNA, 1467 bp, Artificial Sequence
  source: /note="Description of Artificial Sequence: Synthetic polynucleotide"
atggccctccctgtcaccgccctgctgcttccgctggctcttctgctccacgccgctcggccccaagtgcagcttcaggagagcggcccgggactcgtgaagccgtcccagaccctgtccctgacttgcaccgtgtcgggaggaagcatctcgagcggaggctactattggtcgtggattcggcagcaccctggaaagggcctggaatggatcggctacatctactactccggctcgacctactacaacccatcgctgaagtccagagtgacaatctcagtggacacgtccaagaatcagttcagcctgaagctctcttccgtgactgcggccgacaccgccgtgtactactgcgcacgcgctggaattgccgcccggctgaggggtgccttcgacatttggggacagggcaccatggtcaccgtgtcctccggcggcggaggttccgggggtggaggctcaggaggaggggggtccgacatcgtcatgactcagtcgccctcaagcgtcagcgcgtccgtcggggacagagtgatcatcacctgtcgggcgtcccagggaattcgcaactggctggcctggtatcagcagaagcccggaaaggcccccaacctgttgatctacgccgcctcaaacctccaatccggggtgccgagccgcttcagcggctccggttcgggtgccgatttcactctgaccatctcctccctgcaacctgaagatgtggctacctactactgccaaaagtacaactccgcaccttttactttcggaccggggaccaaagtggacattaagaccactaccccagcaccgaggccacccaccccggctcctaccatcgcctcccagcctctgtccctgcgtccggaggcatgtagacccgcagctggtggggccgtgcatacccggggtcttgacttcgcctgcgatatctacatttgggcccctctggctggtacttgcggggtcctgctgctttcactcgtgatcactctttactgtaagcgcggtcggaagaagctgctgtacatctttaagcaacccttcatgaggcctgtgcagactactcaagaggaggacggctgttcatgccggttcccagaggaggaggaaggcggctgcgaactgcgcgtgaaattcagccgcagcgcagatgctccagcctacaagcaggggcagaaccagctctacaacgaactcaatcttggtcggagagaggagtacgacgtgctggacaagcggagaggacgggacccagaaatgggcgggaagccgcgcagaaagaatccccaagagggcctgtacaacgagctccaaaaggataagatggcagaagcctatagcgagattggtatgaaaggggaacgcagaagaggcaaaggccacgacggactgtaccagggactcagcaccgccaccaaggacacctatgacgctcttcacatgcaggccctgccgcctcgg

SEQ ID NO: 1527 - protein, 253 aa, Artificial Sequence
  source: /note="Description of Artificial Sequence: Synthetic polypeptide"
QVQLVQSGAEVKKPGSSVKVSCKASGGTFSSYAISWVRQAPGQGLEWMGGIIPIFGTANYAQKFQGRVTITADESTSTAYMELSSLRSEDTAVYYCARRGGYQLLRWDVGLLRSAFDIWGQGTMVTVSSGGGGSGGGGSGGGGSSYVLTQPPSVSVAPGQTARITCGGNNIGSKSVHWYQQKPGQAPVLVLYGKNNRPSGVPDRFSGSRSGTTASLTITGAQAEDEADYYCSSRDSSGDHLRVFGTGTKVTVL

SEQ ID NO: 1528 - DNA, 759 bp, Artificial Sequence
  source: /note="Description of Artificial Sequence: Synthetic polynucleotide"
caagtgcagctggtccagtcgggcgccgaggtcaagaagcccgggagctctgtgaaagtgtcctgcaaggcctccgggggcacctttagctcctacgccatctcctgggtccgccaagcaccgggtcaaggcctggagtggatggggggaattatccctatcttcggcactgccaactacgcccagaagttccagggacgcgtgaccattaccgcggacgaatccacctccaccgcttatatggagctgtccagcttgcgctcggaagataccgccgtgtactactgcgcccggaggggtggataccagctgctgagatgggacgtgggcctcctgcggtcggcgttcgacatctggggccagggcactatggtcactgtgtccagcggaggaggcggatcgggaggcggcggatcagggggaggcggttccagctacgtgcttactcaacccccttcggtgtccgtggccccgggacagaccgccagaatcacttgcggaggaaacaacattgggtccaagagcgtgcattggtaccagcagaagccaggacaggcccctgtgctggtgctctacgggaagaacaatcggcccagcggagtgccggacaggttctcgggttcacgctccggtacaaccgcttcactgactatcaccggggcccaggcagaggatgaagcggactactactgttcctcccgggattcatccggcgaccacctccgggtgttcggaaccggaacgaaggtcaccgtgctg

SEQ ID NO: 1529 - protein, 129 aa, Artificial Sequence
  source: /note="Description of Artificial Sequence: Synthetic polypeptide"
QVQLVQSGAEVKKPGSSVKVSCKASGGTFSSYAISWVRQAPGQGLEWMGGIIPIFGTANYAQKFQGRVTITADESTSTAYMELSSLRSEDTAVYYCARRGGYQLLRWDVGLLRSAFDIWGQGTMVTVSS

SEQ ID NO: 1530 - protein, 109 aa, Artificial Sequence
  source: /note="Description of Artificial Sequence: Synthetic polypeptide"
SYVLTQPPSVSVAPGQTARITCGGNNIGSKSVHWYQQKPGQAPVLVLYGKNNRPSGVPDRFSGSRSGTTASLTITGAQAEDEADYYCSSRDSSGDHLRVFGTGTKVTVL

SEQ ID NO: 1531 - protein, 497 aa, Artificial Sequence
  source: /note="Description of Artificial Sequence: Synthetic polypeptide"
MALPVTALLLPLALLLHAARPQVQLVQSGAEVKKPGSSVKVSCKASGGTFSSYAISWVRQAPGQGLEWMGGIIPIFGTANYAQKFQGRVTITADESTSTAYMELSSLRSEDTAVYYCARRGGYQLLRWDVGLLRSAFDIWGQGTMVTVSSGGGGSGGGGSGGGGSSYVLTQPPSVSVAPGQTARITCGGNNIGSKSVHWYQQKPGQAPVLVLYGKNNRPSGVPDRFSGSRSGTTASLTITGAQAEDEADYYCSSRDSSGDHLRVFGTGTKVTVLTTTPAPRPPTPAPTIASQPLSLRPEACRPAAGGAVHTRGLDFACDIYIWAPLAGTCGVLLLSLVITLYCKRGRKKLLYIFKQPFMRPVQTTQEEDGCSCRFPEEEEGGCELRVKFSRSADAPAYKQGQNQLYNELNLGRREEYDVLDKRRGRDPEMGGKPRRKNPQEGLYNELQKDKMAEAYSEIGMKGERRRGKGHDGLYQGLSTATKDTYDALHMQALPPR

SEQ ID NO: 1532 - DNA, 1491 bp, Artificial Sequence
  source: /note="Description of Artificial Sequence: Synthetic polynucleotide"
atggccctccctgtcaccgccctgctgcttccgctggctcttctgctccacgccgctcggccccaagtgcagctggtccagtcgggcgccgaggtcaagaagcccgggagctctgtgaaagtgtcctgcaaggcctccgggggcacctttagctcctacgccatctcctgggtccgccaagcaccgggtcaaggcctggagtggatggggggaattatccctatcttcggcactgccaactacgcccagaagttccagggacgcgtgaccattaccgcggacgaatccacctccaccgcttatatggagctgtccagcttgcgctcggaagataccgccgtgtactactgcgcccggaggggtggataccagctgctgagatgggacgtgggcctcctgcggtcggcgttcgacatctggggccagggcactatggtcactgtgtccagcggaggaggcggatcgggaggcggcggatcagggggaggcggttccagctacgtgcttactcaacccccttcggtgtccgtggccccgggacagaccgccagaatcacttgcggaggaaacaacattgggtccaagagcgtgcattggtaccagcagaagccaggacaggcccctgtgctggtgctctacgggaagaacaatcggcccagcggagtgccggacaggttctcgggttcacgctccggtacaaccgcttcactgactatcaccggggcccaggcagaggatgaagcggactactactgttcctcccgggattcatccggcgaccacctccgggtgttcggaaccggaacgaaggtcaccgtgctgaccactaccccagcaccgaggccacccaccccggctcctaccatcgcctcccagcctctgtccctgcgtccggaggcatgtagacccgcagctggtggggccgtgcatacccggggtcttgacttcgcctgcgatatctacatttgggcccctctggctggtacttgcggggtcctgctgctttcactcgtgatcactctttactgtaagcgcggtcggaagaagctgctgtacatctttaagcaacccttcatgaggcctgtgcagactactcaagaggaggacggctgttcatgccggttcccagaggaggaggaaggcggctgcgaactgcgcgtgaaattcagccgcagcgcagatgctccagcctacaagcaggggcagaaccagctctacaacgaactcaatcttggtcggagagaggagtacgacgtgctggacaagcggagaggacgggacccagaaatgggcgggaagccgcgcagaaagaatccccaagagggcctgtacaacgagctccaaaaggataagatggcagaagcctatagcgagattggtatgaaaggggaacgcagaagaggcaaaggccacgacggactgtaccagggactcagcaccgccaccaaggacacctatgacgctcttcacatgcaggccctgccgcctcgg

SEQ ID NO: 1533 - protein, 248 aa, Artificial Sequence
  source: /note="Description of Artificial Sequence: Synthetic polypeptide"
EVQLQQSGPGLVKPSQTLSLTCAISGDSVSSNSAAWNWIRQSPSRGLEWLGRTYYRSKWYSFYAISLKSRIIINPDTSKNQFSLQLKSVTPEDTAVYYCARSSPEGLFLYWFDPWGQGTLVTVSSGGDGSGGGGSGGGGSSSELTQDPAVSVALGQTIRITCQGDSLGNYYATWYQQKPGQAPVLVIYGTNNRPSGIPDRFSASSSGNTASLTITGAQAEDEADYYCNSRDSSGHHLLFGTGTKVTVL

SEQ ID NO: 1534 - DNA, 744 bp, Artificial Sequence
  source: /note="Description of Artificial Sequence: Synthetic polynucleotide"
gaagtgcagctccaacagtcaggaccggggctcgtgaagccatcccagaccctgtccctgacttgtgccatctcgggagatagcgtgtcatcgaactccgccgcctggaactggattcggcagagcccgtcccgcggactggagtggcttggaaggacctactaccggtccaagtggtactctttctacgcgatctcgctgaagtcccgcattatcattaaccctgatacctccaagaatcagttctccctccaactgaaatccgtcacccccgaggacacagcagtgtattactgcgcacggagcagccccgaaggactgttcctgtattggtttgacccctggggccaggggactcttgtgaccgtgtcgagcggcggagatgggtccggtggcggtggttcggggggcggcggatcatcatccgaactgacccaggacccggctgtgtccgtggcgctgggacaaaccatccgcattacgtgccagggagactccctgggcaactactacgccacttggtaccagcagaagccgggccaagcccctgtgttggtcatctacgggaccaacaacagaccttccggcatccccgaccggttcagcgcttcgtcctccggcaacactgccagcctgaccatcactggagcgcaggccgaagatgaggccgactactactgcaacagcagagactcctcgggtcatcacctcttgttcggaactggaaccaaggtcaccgtgctg

SEQ ID NO: 1535 - protein, 125 aa, Artificial Sequence
  source: /note="Description of Artificial Sequence: Synthetic polypeptide"
EVQLQQSGPGLVKPSQTLSLTCAISGDSVSSNSAAWNWIRQSPSRGLEWLGRTYYRSKWYSFYAISLKSRIIINPDTSKNQFSLQLKSVTPEDTAVYYCARSSPEGLFLYWFDPWGQGTLVTVSS

SEQ ID NO: 1536 - protein, 108 aa, Artificial Sequence
  source: /note="Description of Artificial Sequence: Synthetic polypeptide"
SSELTQDPAVSVALGQTIRITCQGDSLGNYYATWYQQKPGQAPVLVIYGTNNRPSGIPDRFSASSSGNTASLTITGAQAEDEADYYCNSRDSSGHHLLFGTGTKVTVL

SEQ ID NO: 1537 - protein, 492 aa, Artificial Sequence
  source: /note="Description of Artificial Sequence: Synthetic polypeptide"
MALPVTALLLPLALLLHAARPEVQLQQSGPGLVKPSQTLSLTCAISGDSVSSNSAAWNWIRQSPSRGLEWLGRTYYRSKWYSFYAISLKSRIIINPDTSKNQFSLQLKSVTPEDTAVYYCARSSPEGLFLYWFDPWGQGTLVTVSSGGDGSGGGGSGGGGSSSELTQDPAVSVALGQTIRITCQGDSLGNYYATWYQQKPGQAPVLVIYGTNNRPSGIPDRFSASSSGNTASLTITGAQAEDEADYYCNSRDSSGHHLLFGTGTKVTVLTTTPAPRPPTPAPTIASQPLSLRPEACRPAAGGAVHTRGLDFACDIYIWAPLAGTCGVLLLSLVITLYCKRGRKKLLYIFKQPFMRPVQTTQEEDGCSCRFPEEEEGGCELRVKFSRSADAPAYKQGQNQLYNELNLGRREEYDVLDKRRGRDPEMGGKPRRKNPQEGLYNELQKDKMAEAYSEIGMKGERRRGKGHDGLYQGLSTATKDTYDALHMQALPPR

SEQ ID NO: 1538 - DNA, 1476 bp, Artificial Sequence
  source: /note="Description of Artificial Sequence: Synthetic polynucleotide"
atggccctccctgtcaccgccctgctgcttccgctggctcttctgctccacgccgctcggcccgaagtgcagctccaacagtcaggaccggggctcgtgaagccatcccagaccctgtccctgacttgtgccatctcgggagatagcgtgtcatcgaactccgccgcctggaactggattcggcagagcccgtcccgcggactggagtggcttggaaggacctactaccggtccaagtggtactctttctacgcgatctcgctgaagtcccgcattatcattaaccctgatacctccaagaatcagttctccctccaactgaaatccgtcacccccgaggacacagcagtgtattactgcgcacggagcagccccgaaggactgttcctgtattggtttgacccctggggccaggggactcttgtgaccgtgtcgagcggcggagatgggtccggtggcggtggttcggggggcggcggatcatcatccgaactgacccaggacccggctgtgtccgtggcgctgggacaaaccatccgcattacgtgccagggagactccctgggcaactactacgccacttggtaccagcagaagccgggccaagcccctgtgttggtcatctacgggaccaacaacagaccttccggcatccccgaccggttcagcgcttcgtcctccggcaacactgccagcctgaccatcactggagcgcaggccgaagatgaggccgactactactgcaacagcagagactcctcgggtcatcacctcttgttcggaactggaaccaaggtcaccgtgctgaccactaccccagcaccgaggccacccaccccggctcctaccatcgcctcccagcctctgtccctgcgtccggaggcatgtagacccgcagctggtggggccgtgcatacccggggtcttgacttcgcctgcgatatctacatttgggcccctctggctggtacttgcggggtcctgctgctttcactcgtgatcactctttactgtaagcgcggtcggaagaagctgctgtacatctttaagcaacccttcatgaggcctgtgcagactactcaagaggaggacggctgttcatgccggttcccagaggaggaggaaggcggctgcgaactgcgcgtgaaattcagccgcagcgcagatgctccagcctacaagcaggggcagaaccagctctacaacgaactcaatcttggtcggagagaggagtacgacgtgctggacaagcggagaggacgggacccagaaatgggcgggaagccgcgcagaaagaatccccaagagggcctgtacaacgagctccaaaaggataagatggcagaagcctatagcgagattggtatgaaaggggaacgcagaagaggcaaaggccacgacggactgtaccagggactcagcaccgccaccaaggacacctatgacgctcttcacatgcaggccctgccgcctcgg

SEQ ID NO: 1539 - protein, 246 aa, Artificial Sequence
  source: /note="Description of Artificial Sequence: Synthetic polypeptide"
EVQLVESGGGLVQPGGSLRLSCAASGFTFSSYAMSWVRQAPGKGLEWVSAISGSGGSTYYADSVKGRFTISRDNSKNTLYLQMNSLRAEDTAVYYCAKVEGSGSLDYWGQGTLVTVSSGGGGSGGGGSGGGGSEIVMTQSPGTLSLSPGERATLSCRASQSVSSAYLAWYQQKPGQPPRLLISGASTRATGIPDRFGGSGSGTDFTLTISRLEPEDFAVYYCQHYGSSFNGSSLFTFGQGTRLEIK

SEQ ID NO: 1540 - DNA, 738 bp, Artificial Sequence
  source: /note="Description of Artificial Sequence: Synthetic polynucleotide"
gaagtgcagctcgtggagtcaggaggcggcctggtccagccgggagggtcccttagactgtcatgcgccgcaagcggattcactttctcctcctatgccatgagctgggtccgccaagcccccggaaagggactggaatgggtgtccgccatctcggggtctggaggctcaacttactacgctgactccgtgaagggacggttcaccattagccgcgacaactccaagaacaccctctacctccaaatgaactccctgcgggccgaggataccgccgtctactactgcgccaaagtggaaggttcaggatcgctggactactggggacagggtactctcgtgaccgtgtcatcgggcggaggaggttccggcggtggcggctccggcggcggagggtcggagatcgtgatgacccagagccctggtactctgagcctttcgccgggagaaagggccaccctgtcctgccgcgcttcccaatccgtgtcctccgcgtacttggcgtggtaccagcagaagccgggacagccccctcggctgctgatcagcggggccagcacccgggcaaccggaatcccagacagattcgggggttccggcagcggcacagatttcaccctgactatttcgaggttggagcccgaggactttgcggtgtattactgtcagcactacgggtcgtcctttaatggctccagcctgttcacgttcggacaggggacccgcctggaaatcaag

SEQ ID NO: 1541 - protein, 118 aa, Artificial Sequence
  source: /note="Description of Artificial Sequence: Synthetic polypeptide"
EVQLVESGGGLVQPGGSLRLSCAASGFTFSSYAMSWVRQAPGKGLEWVSAISGSGGSTYYADSVKGRFTISRDNSKNTLYLQMNSLRAEDTAVYYCAKVEGSGSLDYWGQGTLVTVSS

SEQ ID NO: 1542 - protein, 113 aa, Artificial Sequence
  source: /note="Description of Artificial Sequence: Synthetic polypeptide"
EIVMTQSPGTLSLSPGERATLSCRASQSVSSAYLAWYQQKPGQPPRLLISGASTRATGIPDRFGGSGSGTDFTLTISRLEPEDFAVYYCQHYGSSFNGSSLFTFGQGTRLEIK

SEQ ID NO: 1543 - protein, 490 aa, Artificial Sequence
  source: /note="Description of Artificial Sequence: Synthetic polypeptide"
MALPVTALLLPLALLLHAARPEVQLVESGGGLVQPGGSLRLSCAASGFTFSSYAMSWVRQAPGKGLEWVSAISGSGGSTYYADSVKGRFTISRDNSKNTLYLQMNSLRAEDTAVYYCAKVEGSGSLDYWGQGTLVTVSSGGGGSGGGGSGGGGSEIVMTQSPGTLSLSPGERATLSCRASQSVSSAYLAWYQQKPGQPPRLLISGASTRATGIPDRFGGSGSGTDFTLTISRLEPEDFAVYYCQHYGSSFNGSSLFTFGQGTRLEIKTTTPAPRPPTPAPTIASQPLSLRPEACRPAAGGAVHTRGLDFACDIYIWAPLAGTCGVLLLSLVITLYCKRGRKKLLYIFKQPFMRPVQTTQEEDGCSCRFPEEEEGGCELRVKFSRSADAPAYKQGQNQLYNELNLGRREEYDVLDKRRGRDPEMGGKPRRKNPQEGLYNELQKDKMAEAYSEIGMKGERRRGKGHDGLYQGLSTATKDTYDALHMQALPPR

SEQ ID NO: 1544 - DNA, 1470 bp, Artificial Sequence
  source: /note="Description of Artificial Sequence: Synthetic polynucleotide"
atggccctccctgtcaccgccctgctgcttccgctggctcttctgctccacgccgctcggcccgaagtgcagctcgtggagtcaggaggcggcctggtccagccgggagggtcccttagactgtcatgcgccgcaagcggattcactttctcctcctatgccatgagctgggtccgccaagcccccggaaagggactggaatgggtgtccgccatctcggggtctggaggctcaacttactacgctgactccgtgaagggacggttcaccattagccgcgacaactccaagaacaccctctacctccaaatgaactccctgcgggccgaggataccgccgtctactactgcgccaaagtggaaggttcaggatcgctggactactggggacagggtactctcgtgaccgtgtcatcgggcggaggaggttccggcggtggcggctccggcggcggagggtcggagatcgtgatgacccagagccctggtactctgagcctttcgccgggagaaagggccaccctgtcctgccgcgcttcccaatccgtgtcctccgcgtacttggcgtggtaccagcagaagccgggacagccccctcggctgctgatcagcggggccagcacccgggcaaccggaatcccagacagattcgggggttccggcagcggcacagatttcaccctgactatttcgaggttggagcccgaggactttgcggtgtattactgtcagcactacgggtcgtcctttaatggctccagcctgttcacgttcggacaggggacccgcctggaaatcaagaccactaccccagcaccgaggccacccaccccggctcctaccatcgcctcccagcctctgtccctgcgtccggaggcatgtagacccgcagctggtggggccgtgcatacccggggtcttgacttcgcctgcgatatctacatttgggcccctctggctggtacttgcggggtcctgctgctttcactcgtgatcactctttactgtaagcgcggtcggaagaagctgctgtacatctttaagcaacccttcatgaggcctgtgcagactactcaagaggaggacggctgttcatgccggttcccagaggaggaggaaggcggctgcgaactgcgcgtgaaattcagccgcagcgcagatgctccagcctacaagcaggggcagaaccagctctacaacgaactcaatcttggtcggagagaggagtacgacgtgctggacaagcggagaggacgggacccagaaatgggcgggaagccgcgcagaaagaatccccaagagggcctgtacaacgagctccaaaaggataagatggcagaagcctatagcgagattggtatgaaaggggaacgcagaagaggcaaaggccacgacggactgtaccagggactcagcaccgccaccaaggacacctatgacgctcttcacatgcaggccctgccgcctcgg

SEQ ID NO: 1545 - protein, 241 aa, Artificial Sequence
  source: /note="Description of Artificial Sequence: Synthetic polypeptide"
EVQLVETGGGLVQPGGSLRLSCAASGITFSRYPMSWVRQAPGKGLEWVSGISDSGVSTYYADSAKGRFTISRDNSKNTLFLQMSSLRDEDTAVYYCVTRAGSEASDIWGQGTMVTVSSGGGGSGGGGSGGGGSEIVLTQSPATLSLSPGERATLSCRASQSVSNSLAWYQQKPGQAPRLLIYDASSRATGIPDRFSGSGSGTDFTLTISRLEPEDFAIYYCQQFGTSSGLTFGGGTKLEIK

SEQ ID NO: 1546 - DNA, 723 bp, Artificial Sequence
  source: /note="Description of Artificial Sequence: Synthetic polynucleotide"
gaagtgcaactggtggaaaccggtggcggcctggtgcagcctggaggatcattgaggctgtcatgcgcggccagcggtattaccttctcccggtaccccatgtcctgggtcagacaggccccggggaaagggcttgaatgggtgtccgggatctcggactccggtgtcagcacttactacgccgactccgccaagggacgcttcaccatttcccgggacaactcgaagaacaccctgttcctccaaatgagctccctccgggacgaggatactgcagtgtactactgcgtgacccgcgccgggtccgaggcgtctgacatttggggacagggcactatggtcaccgtgtcgtccggcggagggggctcgggaggcggtggcagcggaggaggagggtccgagatcgtgctgacccaatccccggccaccctctcgctgagccctggagaaagggcaaccttgtcctgtcgcgcgagccagtccgtgagcaactccctggcctggtaccagcagaagcccggacaggctccgagacttctgatctacgacgcttcgagccgggccactggaatccccgaccgcttttcggggtccggctcaggaaccgatttcaccctgacaatctcacggctggagccagaggatttcgccatctattactgccagcagttcggtacttcctccggcctgactttcggaggcggcacgaagctcgaaatcaag

SEQ ID NO: 1547 - protein, 118 aa, Artificial Sequence
  source: /note="Description of Artificial Sequence: Synthetic polypeptide"
EVQLVETGGGLVQPGGSLRLSCAASGITFSRYPMSWVRQAPGKGLEWVSGISDSGVSTYYADSAKGRFTISRDNSKNTLFLQMSSLRDEDTAVYYCVTRAGSEASDIWGQGTMVTVSS

SEQ ID NO: 1548 - protein, 108 aa, Artificial Sequence
  source: /note="Description of Artificial Sequence: Synthetic polypeptide"
EIVLTQSPATLSLSPGERATLSCRASQSVSNSLAWYQQKPGQAPRLLIYDASSRATGIPDRFSGSGSGTDFTLTISRLEPEDFAIYYCQQFGTSSGLTFGGGTKLEIK

SEQ ID NO: 1549 - protein, 485 aa, Artificial Sequence
  source: /note="Description of Artificial Sequence: Synthetic polypeptide"
MALPVTALLLPLALLLHAARPEVQLVETGGGLVQPGGSLRLSCAASGITFSRYPMSWVRQAPGKGLEWVSGISDSGVSTYYADSAKGRFTISRDNSKNTLFLQMSSLRDEDTAVYYCVTRAGSEASDIWGQGTMVTVSSGGGGSGGGGSGGGGSEIVLTQSPATLSLSPGERATLSCRASQSVSNSLAWYQQKPGQAPRLLIYDASSRATGIPDRFSGSGSGTDFTLTISRLEPEDFAIYYCQQFGTSSGLTFGGGTKLEIKTTTPAPRPPTPAPTIASQPLSLRPEACRPAAGGAVHTRGLDFACDIYIWAPLAGTCGVLLLSLVITLYCKRGRKKLLYIFKQPFMRPVQTTQEEDGCSCRFPEEEEGGCELRVKFSRSADAPAYKQGQNQLYNELNLGRREEYDVLDKRRGRDPEMGGKPRRKNPQEGLYNELQKDKMAEAYSEIGMKGERRRGKGHDGLYQGLSTATKDTYDALHMQALPPR

SEQ ID NO: 1550 - DNA, 1455 bp, Artificial Sequence
  source: /note="Description of Artificial Sequence: Synthetic polynucleotide"
atggccctccctgtcaccgccctgctgcttccgctggctcttctgctccacgccgctcggcccgaagtgcaactggtggaaaccggtggcggcctggtgcagcctggaggatcattgaggctgtcatgcgcggccagcggtattaccttctcccggtaccccatgtcctgggtcagacaggccccggggaaagggcttgaatgggtgtccgggatctcggactccggtgtcagcacttactacgccgactccgccaagggacgcttcaccatttcccgggacaactcgaagaacaccctgttcctccaaatgagctccctccgggacgaggatactgcagtgtactactgcgtgacccgcgccgggtccgaggcgtctgacatttggggacagggcactatggtcaccgtgtcgtccggcggagggggctcgggaggcggtggcagcggaggaggagggtccgagatcgtgctgacccaatccccggccaccctctcgctgagccctggagaaagggcaaccttgtcctgtcgcgcgagccagtccgtgagcaactccctggcctggtaccagcagaagcccggacaggctccgagacttctgatctacgacgcttcgagccgggccactggaatccccgaccgcttttcggggtccggctcaggaaccgatttcaccctgacaatctcacggctggagccagaggatttcgccatctattactgccagcagttcggtacttcctccggcctgactttcggaggcggcacgaagctcgaaatcaagaccactaccccagcaccgaggccacccaccccggctcctaccatcgcctcccagcctctgtccctgcgtccggaggcatgtagacccgcagctggtggggccgtgcatacccggggtcttgacttcgcctgcgatatctacatttgggcccctctggctggtacttgcggggtcctgctgctttcactcgtgatcactctttactgtaagcgcggtcggaagaagctgctgtacatctttaagcaacccttcatgaggcctgtgcagactactcaagaggaggacggctgttcatgccggttcccagaggaggaggaaggcggctgcgaactgcgcgtgaaattcagccgcagcgcagatgctccagcctacaagcaggggcagaaccagctctacaacgaactcaatcttggtcggagagaggagtacgacgtgctggacaagcggagaggacgggacccagaaatgggcgggaagccgcgcagaaagaatccccaagagggcctgtacaacgagctccaaaaggataagatggcagaagcctatagcgagattggtatgaaaggggaacgcagaagaggcaaaggccacgacggactgtaccagggactcagcaccgccaccaaggacacctatgacgctcttcacatgcaggccctgccgcctcgg

SEQ ID NO: 1551 - protein, 248 aa, Artificial Sequence
  source: /note="Description of Artificial Sequence: Synthetic polypeptide"
QVQLVESGGGLVQPGGSLRLSCAASGFTFSSYAMSWVRQAPGKGLEWVSAISGSGGSTYYADSVKGRFTISRDNAKNSLYLQMNSLRAEDTAIYYCARATYKRELRYYYGMDVWGQGTMVTVSSGGGGSGGGGSGGGGSEIVMTQSPGTVSLSPGERATLSCRASQSVSSSFLAWYQQKPGQAPRLLIYGASSRATGIPDRFSGSGSGTDFTLTISRLEPEDSAVYYCQQYHSSPSWTFGQGTRLEIK

SEQ ID NO: 1552 - DNA, 744 bp, Artificial Sequence
  source: /note="Description of Artificial Sequence: Synthetic polynucleotide"
caagtgcagctcgtggaatcgggtggcggactggtgcagccggggggctcacttagactgtcctgcgcggccagcggattcactttctcctcctacgccatgtcctgggtcagacaggcccctggaaagggcctggaatgggtgtccgcaatcagcggcagcggcggctcgacctattacgcggattcagtgaagggcagattcaccatttcccgggacaacgccaagaactccttgtaccttcaaatgaactccctccgcgcggaagataccgcaatctactactgcgctcgggccacttacaagagggaactgcgctactactacgggatggacgtctggggccagggaaccatggtcaccgtgtccagcggaggaggaggatcgggaggaggcggtagcgggggtggagggtcggagatcgtgatgacccagtcccccggcactgtgtcgctgtcccccggcgaacgggccaccctgtcatgtcgggccagccagtcagtgtcgtcaagcttcctcgcctggtaccagcagaaaccgggacaagctccccgcctgctgatctacggagccagcagccgggccaccggtattcctgaccggttctccggttcggggtccgggaccgactttactctgactatctctcgcctcgagccagaggactccgccgtgtattactgccagcagtaccactcctccccgtcctggacgttcggacagggcacaaggctggagattaag

SEQ ID NO: 1553 - protein, 124 aa, Artificial Sequence
  source: /note="Description of Artificial Sequence: Synthetic polypeptide"
QVQLVESGGGLVQPGGSLRLSCAASGFTFSSYAMSWVRQAPGKGLEWVSAISGSGGSTYYADSVKGRFTISRDNAKNSLYLQMNSLRAEDTAIYYCARATYKRELRYYYGMDVWGQGTMVTVSS

SEQ ID NO: 1554 - protein, 109 aa, Artificial Sequence
  source: /note="Description of Artificial Sequence: Synthetic polypeptide"
EIVMTQSPGTVSLSPGERATLSCRASQSVSSSFLAWYQQKPGQAPRLLIYGASSRATGIPDRFSGSGSGTDFTLTISRLEPEDSAVYYCQQYHSSPSWTFGQGTRLEIK

SEQ ID NO: 1555 - protein, 492 aa, Artificial Sequence
  source: /note="Description of Artificial Sequence: Synthetic polypeptide"
MALPVTALLLPLALLLHAARPQVQLVESGGGLVQPGGSLRLSCAASGFTFSSYAMSWVRQAPGKGLEWVSAISGSGGSTYYADSVKGRFTISRDNAKNSLYLQMNSLRAEDTAIYYCARATYKRELRYYYGMDVWGQGTMVTVSSGGGGSGGGGSGGGGSEIVMTQSPGTVSLSPGERATLSCRASQSVSSSFLAWYQQKPGQAPRLLIYGASSRATGIPDRFSGSGSGTDFTLTISRLEPEDSAVYYCQQYHSSPSWTFGQGTRLEIKTTTPAPRPPTPAPTIASQPLSLRPEACRPAAGGAVHTRGLDFACDIYIWAPLAGTCGVLLLSLVITLYCKRGRKKLLYIFKQPFMRPVQTTQEEDGCSCRFPEEEEGGCELRVKFSRSADAPAYKQGQNQLYNELNLGRREEYDVLDKRRGRDPEMGGKPRRKNPQEGLYNELQKDKMAEAYSEIGMKGERRRGKGHDGLYQGLSTATKDTYDALHMQALPPR

SEQ ID NO: 1556 - DNA, 1476 bp, Artificial Sequence
  source: /note="Description of Artificial Sequence: Synthetic polynucleotide"
atggccctccctgtcaccgccctgctgcttccgctggctcttctgctccacgccgctcggccccaagtgcagctcgtggaatcgggtggcggactggtgcagccggggggctcacttagactgtcctgcgcggccagcggattcactttctcctcctacgccatgtcctgggtcagacaggcccctggaaagggcctggaatgggtgtccgcaatcagcggcagcggcggctcgacctattacgcggattcagtgaagggcagattcaccatttcccgggacaacgccaagaactccttgtaccttcaaatgaactccctccgcgcggaagataccgcaatctactactgcgctcgggccacttacaagagggaactgcgctactactacgggatggacgtctggggccagggaaccatggtcaccgtgtccagcggaggaggaggatcgggaggaggcggtagcgggggtggagggtcggagatcgtgatgacccagtcccccggcactgtgtcgctgtcccccggcgaacgggccaccctgtcatgtcgggccagccagtcagtgtcgtcaagcttcctcgcctggtaccagcagaaaccgggacaagctccccgcctgctgatctacggagccagcagccgggccaccggtattcctgaccggttctccggttcggggtccgggaccgactttactctgactatctctcgcctcgagccagaggactccgccgtgtattactgccagcagtaccactcctccccgtcctggacgttcggacagggcacaaggctggagattaagaccactaccccagcaccgaggccacccaccccggctcctaccatcgcctcccagcctctgtccctgcgtccggaggcatgtagacccgcagctggtggggccgtgcatacccggggtcttgacttcgcctgcgatatctacatttgggcccctctggctggtacttgcggggtcctgctgctttcactcgtgatcactctttactgtaagcgcggtcggaagaagctgctgtacatctttaagcaacccttcatgaggcctgtgcagactactcaagaggaggacggctgttcatgccggttcccagaggaggaggaaggcggctgcgaactgcgcgtgaaattcagccgcagcgcagatgctccagcctacaagcaggggcagaaccagctctacaacgaactcaatcttggtcggagagaggagtacgacgtgctggacaagcggagaggacgggacccagaaatgggcgggaagccgcgcagaaagaatccccaagagggcctgtacaacgagctccaaaaggataagatggcagaagcctatagcgagattggtatgaaaggggaacgcagaagaggcaaaggccacgacggactgtaccagggactcagcaccgccaccaaggacacctatgacgctcttcacatgcaggccctgccgcctcgg

SEQ ID NO: 1557 - protein, 248 aa, Artificial Sequence
  source: /note="Description of Artificial Sequence: Synthetic polypeptide"
EVQLVETGGGLVQPGGSLRLSCAASGFTFSSYAMSWVRQAPGKGLEWVSAISGSGGSTYYADSVKGRFTISRDNSKNTLYLQMNTLKAEDTAVYYCARATYKRELRYYYGMDVWGQGTTVTVSSGGGGSGGGGSGGGGSEIVLTQSPSTLSLSPGESATLSCRASQSVSTTFLAWYQQKPGQAPRLLIYGSSNRATGIPDRFSGSGSGTDFTLTIRRLEPEDFAVYYCQQYHSSPSWTFGQGTKVEIK

SEQ ID NO: 1558 - DNA, 744 bp, Artificial Sequence
  source: /note="Description of Artificial Sequence: Synthetic polynucleotide"
gaggtgcagcttgtggaaaccggtggcggactggtgcagcccggaggaagcctcaggctgtcctgcgccgcgtccggcttcaccttctcctcgtacgccatgtcctgggtccgccaggcccccggaaagggcctggaatgggtgtccgccatctctggaagcggaggttccacgtactacgcggacagcgtcaagggaaggttcacaatctcccgcgataattcgaagaacactctgtaccttcaaatgaacaccctgaaggccgaggacactgctgtgtactactgcgcacgggccacctacaagagagagctccggtactactacggaatggacgtctggggccagggaactactgtgaccgtgtcctcgggagggggtggctccggggggggcggctccggcggaggcggttccgagattgtgctgacccagtcaccttcaactctgtcgctgtccccgggagagagcgctactctgagctgccgggccagccagtccgtgtccaccaccttcctcgcctggtatcagcagaagccggggcaggcaccacggctcttgatctacgggtcaagcaacagagcgaccggaattcctgaccgcttctcggggagcggttcaggcaccgacttcaccctgactatccggcgcctggaacccgaagatttcgccgtgtattactgtcaacagtaccactcctcgccgtcctggacctttggccaaggaaccaaagtggaaatcaag

SEQ ID NO: 1559 - protein, 124 aa, Artificial Sequence
  source: /note="Description of Artificial Sequence: Synthetic polypeptide"
EVQLVETGGGLVQPGGSLRLSCAASGFTFSSYAMSWVRQAPGKGLEWVSAISGSGGSTYYADSVKGRFTISRDNSKNTLYLQMNTLKAEDTAVYYCARATYKRELRYYYGMDVWGQGTTVTVSS

SEQ ID NO: 1560 - protein, 109 aa, Artificial Sequence
  source: /note="Description of Artificial Sequence: Synthetic polypeptide"
EIVLTQSPSTLSLSPGESATLSCRASQSVSTTFLAWYQQKPGQAPRLLIYGSSNRATGIPDRFSGSGSGTDFTLTIRRLEPEDFAVYYCQQYHSSPSWTFGQGTKVEIK

SEQ ID NO: 1561 - protein, 492 aa, Artificial Sequence
  source: /note="Description of Artificial Sequence: Synthetic polypeptide"
MALPVTALLLPLALLLHAARPEVQLVETGGGLVQPGGSLRLSCAASGFTFSSYAMSWVRQAPGKGLEWVSAISGSGGSTYYADSVKGRFTISRDNSKNTLYLQMNTLKAEDTAVYYCARATYKRELRYYYGMDVWGQGTTVTVSSGGGGSGGGGSGGGGSEIVLTQSPSTLSLSPGESATLSCRASQSVSTTFLAWYQQKPGQAPRLLIYGSSNRATGIPDRFSGSGSGTDFTLTIRRLEPEDFAVYYCQQYHSSPSWTFGQGTKVEIKTTTPAPRPPTPAPTIASQPLSLRPEACRPAAGGAVHTRGLDFACDIYIWAPLAGTCGVLLLSLVITLYCKRGRKKLLYIFKQPFMRPVQTTQEEDGCSCRFPEEEEGGCELRVKFSRSADAPAYKQGQNQLYNELNLGRREEYDVLDKRRGRDPEMGGKPRRKNPQEGLYNELQKDKMAEAYSEIGMKGERRRGKGHDGLYQGLSTATKDTYDALHMQALPPR

SEQ ID NO: 1562 - DNA, 1476 bp, Artificial Sequence
  source: /note="Description of Artificial Sequence: Synthetic polynucleotide"
atggccctccctgtcaccgccctgctgcttccgctggctcttctgctccacgccgctcggcccgaggtgcagcttgtggaaaccggtggcggactggtgcagcccggaggaagcctcaggctgtcctgcgccgcgtccggcttcaccttctcctcgtacgccatgtcctgggtccgccaggcccccggaaagggcctggaatgggtgtccgccatctctggaagcggaggttccacgtactacgcggacagcgtcaagggaaggttcacaatctcccgcgataattcgaagaacactctgtaccttcaaatgaacaccctgaaggccgaggacactgctgtgtactactgcgcacgggccacctacaagagagagctccggtactactacggaatggacgtctggggccagggaactactgtgaccgtgtcctcgggagggggtggctccggggggggcggctccggcggaggcggttccgagattgtgctgacccagtcaccttcaactctgtcgctgtccccgggagagagcgctactctgagctgccgggccagccagtccgtgtccaccaccttcctcgcctggtatcagcagaagccggggcaggcaccacggctcttgatctacgggtcaagcaacagagcgaccggaattcctgaccgcttctcggggagcggttcaggcaccgacttcaccctgactatccggcgcctggaacccgaagatttcgccgtgtattactgtcaacagtaccactcctcgccgtcctggacctttggccaaggaaccaaagtggaaatcaagaccactaccccagcaccgaggccacccaccccggctcctaccatcgcctcccagcctctgtccctgcgtccggaggcatgtagacccgcagctggtggggccgtgcatacccggggtcttgacttcgcctgcgatatctacatttgggcccctctggctggtacttgcggggtcctgctgctttcactcgtgatcactctttactgtaagcgcggtcggaagaagctgctgtacatctttaagcaacccttcatgaggcctgtgcagactactcaagaggaggacggctgttcatgccggttcccagaggaggaggaaggcggctgcgaactgcgcgtgaaattcagccgcagcgcagatgctccagcctacaagcaggggcagaaccagctctacaacgaactcaatcttggtcggagagaggagtacgacgtgctggacaagcggagaggacgggacccagaaatgggcgggaagccgcgcagaaagaatccccaagagggcctgtacaacgagctccaaaaggataagatggcagaagcctatagcgagattggtatgaaaggggaacgcagaagaggcaaaggccacgacggactgtaccagggactcagcaccgccaccaaggacacctatgacgctcttcacatgcaggccctgccgcctcgg

SEQ ID NO: 1563 - protein, 239 aa, Artificial Sequence
  source: /note="Description of Artificial Sequence: Synthetic polypeptide"
EVQLVETGGGLVQPGRSLRLSCAASGFTFDDYAMHWVRQAPGKGLEWVSGISWNSGSIGYADSVKGRFTISRDNAKNSLYLQMNSLRDEDTAVYYCARVGKAVPDVWGQGTTVTVSSGGGGSGGGGSGGGGSDIVMTQTPSSLSASVGDRVTITCRASQSISSYLNWYQQKPGKAPKLLIYAASSLQSGVPSRFSGSGSGTDFTLTISSLQPEDFATYYCQQSYSTPYSFGQGTRLEIK

SEQ ID NO: 1564 - DNA, 717 bp, Artificial Sequence
  source: /note="Description of Artificial Sequence: Synthetic polynucleotide"
gaagtgcagctcgtggaaactggaggtggactcgtgcagcctggacggtcgctgcggctgagctgcgctgcatccggcttcaccttcgacgattatgccatgcactgggtcagacaggcgccagggaagggacttgagtgggtgtccggtatcagctggaatagcggctcaatcggatacgcggactccgtgaagggaaggttcaccatttcccgcgacaacgccaagaactccctgtacttgcaaatgaacagcctccgggatgaggacactgccgtgtactactgcgcccgcgtcggaaaagctgtgcccgacgtctggggccagggaaccactgtgaccgtgtccagcggcgggggtggatcgggcggtggagggtccggtggagggggctcagatattgtgatgacccagaccccctcgtccctgtccgcctcggtcggcgaccgcgtgactatcacatgtagagcctcgcagagcatctccagctacctgaactggtatcagcagaagccggggaaggccccgaagctcctgatctacgcggcatcatcactgcaatcgggagtgccgagccggttttccgggtccggctccggcaccgacttcacgctgaccatttcttccctgcaacccgaggacttcgccacttactactgccagcagtcctactccaccccttactccttcggccaaggaaccaggctggaaatcaag

SEQ ID NO: 1565 - protein, 117 aa, Artificial Sequence
  source: /note="Description of Artificial Sequence: Synthetic polypeptide"
EVQLVETGGGLVQPGRSLRLSCAASGFTFDDYAMHWVRQAPGKGLEWVSGISWNSGSIGYADSVKGRFTISRDNAKNSLYLQMNSLRDEDTAVYYCARVGKAVPDVWGQGTTVTVSS

SEQ ID NO: 1566 - protein, 107 aa, Artificial Sequence
  source: /note="Description of Artificial Sequence: Synthetic polypeptide"
DIVMTQTPSSLSASVGDRVTITCRASQSISSYLNWYQQKPGKAPKLLIYAASSLQSGVPSRFSGSGSGTDFTLTISSLQPEDFATYYCQQSYSTPYSFGQGTRLEIK

SEQ ID NO: 1567 - protein, 483 aa, Artificial Sequence
  source: /note="Description of Artificial Sequence: Synthetic polypeptide"
MALPVTALLLPLALLLHAARPEVQLVETGGGLVQPGRSLRLSCAASGFTFDDYAMHWVRQAPGKGLEWVSGISWNSGSIGYADSVKGRFTISRDNAKNSLYLQMNSLRDEDTAVYYCARVGKAVPDVWGQGTTVTVSSGGGGSGGGGSGGGGSDIVMTQTPSSLSASVGDRVTITCRASQSISSYLNWYQQKPGKAPKLLIYAASSLQSGVPSRFSGSGSGTDFTLTISSLQPEDFATYYCQQSYSTPYSFGQGTRLEIKTTTPAPRPPTPAPTIASQPLSLRPEACRPAAGGAVHTRGLDFACDIYIWAPLAGTCGVLLLSLVITLYCKRGRKKLLYIFKQPFMRPVQTTQEEDGCSCRFPEEEEGGCELRVKFSRSADAPAYKQGQNQLYNELNLGRREEYDVLDKRRGRDPEMGGKPRRKNPQEGLYNELQKDKMAEAYSEIGMKGERRRGKGHDGLYQGLSTATKDTYDALHMQALPPR

SEQ ID NO: 1568 - DNA, 1449 bp, Artificial Sequence
  source: /note="Description of Artificial Sequence: Synthetic polynucleotide"
atggccctccctgtcaccgccctgctgcttccgctggctcttctgctccacgccgctcggcccgaagtgcagctcgtggaaactggaggtggactcgtgcagcctggacggtcgctgcggctgagctgcgctgcatccggcttcaccttcgacgattatgccatgcactgggtcagacaggcgccagggaagggacttgagtgggtgtccggtatcagctggaatagcggctcaatcggatacgcggactccgtgaagggaaggttcaccatttcccgcgacaacgccaagaactccctgtacttgcaaatgaacagcctccgggatgaggacactgccgtgtactactgcgcccgcgtcggaaaagctgtgcccgacgtctggggccagggaaccactgtgaccgtgtccagcggcgggggtggatcgggcggtggagggtccggtggagggggctcagatattgtgatgacccagaccccctcgtccctgtccgcctcggtcggcgaccgcgtgactatcacatgtagagcctcgcagagcatctccagctacctgaactggtatcagcagaagccggggaaggccccgaagctcctgatctacgcggcatcatcactgcaatcgggagtgccgagccggttttccgggtccggctccggcaccgacttcacgctgaccatttcttccctgcaacccgaggacttcgccacttactactgccagcagtcctactccaccccttactccttcggccaaggaaccaggctggaaatcaagaccactaccccagcaccgaggccacccaccccggctcctaccatcgcctcccagcctctgtccctgcgtccggaggcatgtagacccgcagctggtggggccgtgcatacccggggtcttgacttcgcctgcgatatctacatttgggcccctctggctggtacttgcggggtcctgctgctttcactcgtgatcactctttactgtaagcgcggtcggaagaagctgctgtacatctttaagcaacccttcatgaggcctgtgcagactactcaagaggaggacggctgttcatgccggttcccagaggaggaggaaggcggctgcgaactgcgcgtgaaattcagccgcagcgcagatgctccagcctacaagcaggggcagaaccagctctacaacgaactcaatcttggtcggagagaggagtacgacgtgctggacaagcggagaggacgggacccagaaatgggcgggaagccgcgcagaaagaatccccaagagggcctgtacaacgagctccaaaaggataagatggcagaagcctatagcgagattggtatgaaaggggaacgcagaagaggcaaaggccacgacggactgtaccagggactcagcaccgccaccaaggacacctatgacgctcttcacatgcaggccctgccgcctcgg

SEQ ID NO: 1569 - protein, 246 aa, Artificial Sequence
  source: /note="Description of Artificial Sequence: Synthetic polypeptide"
EVQLVESGGGLVQPGRSLRLSCTASGFTFDDYAMHWVRQRPGKGLEWVASINWKGNSLAYGDSVKGRFAISRDNAKNTVFLQMNSLRTEDTAVYYCASHQGVAYYNYAMDVWGRGTLVTVSSGGGGSGGGGSGGGGSEIVLTQSPGTLSLSPGERATLSCRATQSIGSSFLAWYQQRPGQAPRLLIYGASQRATGIPDRFSGRGSGTDFTLTISRVEPEDSAVYYCQHYESSPSWTFGQGTKVEIK

SEQ ID NO: 1570 - DNA, 738 bp, Artificial Sequence
  source: /note="Description of Artificial Sequence: Synthetic polynucleotide"
gaagtgcagctcgtggagagcgggggaggattggtgcagcccggaaggtccctgcggctctcctgcactgcgtctggcttcaccttcgacgactacgcgatgcactgggtcagacagcgcccgggaaagggcctggaatgggtcgcctcaatcaactggaagggaaactccctggcctatggcgacagcgtgaagggccgcttcgccatttcgcgcgacaacgccaagaacaccgtgtttctgcaaatgaattccctgcggaccgaggataccgctgtgtactactgcgccagccaccagggcgtggcatactataactacgccatggacgtgtggggaagagggacgctcgtcaccgtgtcctccgggggcggtggatcgggtggaggaggaagcggtggcgggggcagcgaaatcgtgctgactcagagcccgggaactctttcactgtccccgggagaacgggccactctctcgtgccgggccacccagtccatcggctcctccttccttgcctggtaccagcagaggccaggacaggcgccccgcctgctgatctacggtgcttcccaacgcgccactggcattcctgaccggttcagcggcagagggtcgggaaccgatttcacactgaccatttcccgggtggagcccgaagattcggcagtctactactgtcagcattacgagtcctccccttcatggaccttcggtcaagggaccaaagtggagatcaag

SEQ ID NO: 1571 - protein, 122 aa, Artificial Sequence
  source: /note="Description of Artificial Sequence: Synthetic polypeptide"
EVQLVESGGGLVQPGRSLRLSCTASGFTFDDYAMHWVRQRPGKGLEWVASINWKGNSLAYGDSVKGRFAISRDNAKNTVFLQMNSLRTEDTAVYYCASHQGVAYYNYAMDVWGRGTLVTVSS

SEQ ID NO: 1572 - protein, 109 aa, Artificial Sequence
  source: /note="Description of Artificial Sequence: Synthetic polypeptide"
EIVLTQSPGTLSLSPGERATLSCRATQSIGSSFLAWYQQRPGQAPRLLIYGASQRATGIPDRFSGRGSGTDFTLTISRVEPEDSAVYYCQHYESSPSWTFGQGTKVEIK

SEQ ID NO: 1573 - protein, 490 aa, Artificial Sequence
  source: /note="Description of Artificial Sequence: Synthetic polypeptide"
MALPVTALLLPLALLLHAARPEVQLVESGGGLVQPGRSLRLSCTASGFTFDDYAMHWVRQRPGKGLEWVASINWKGNSLAYGDSVKGRFAISRDNAKNTVFLQMNSLRTEDTAVYYCASHQGVAYYNYAMDVWGRGTLVTVSSGGGGSGGGGSGGGGSEIVLTQSPGTLSLSPGERATLSCRATQSIGSSFLAWYQQRPGQAPRLLIYGASQRATGIPDRFSGRGSGTDFTLTISRVEPEDSAVYYCQHYESSPSWTFGQGTKVEIKTTTPAPRPPTPAPTIASQPLSLRPEACRPAAGGAVHTRGLDFACDIYIWAPLAGTCGVLLLSLVITLYCKRGRKKLLYIFKQPFMRPVQTTQEEDGCSCRFPEEEEGGCELRVKFSRSADAPAYKQGQNQLYNELNLGRREEYDVLDKRRGRDPEMGGKPRRKNPQEGLYNELQKDKMAEAYSEIGMKGERRRGKGHDGLYQGLSTATKDTYDALHMQALPPR

SEQ ID NO: 1574 - DNA, 1470 bp, Artificial Sequence
  source: /note="Description of Artificial Sequence: Synthetic polynucleotide"
atggccctccctgtcaccgccctgctgcttccgctggctcttctgctccacgccgctcggcccgaagtgcagctcgtggagagcgggggaggattggtgcagcccggaaggtccctgcggctctcctgcactgcgtctggcttcaccttcgacgactacgcgatgcactgggtcagacagcgcccgggaaagggcctggaatgggtcgcctcaatcaactggaagggaaactccctggcctatggcgacagcgtgaagggccgcttcgccatttcgcgcgacaacgccaagaacaccgtgtttctgcaaatgaattccctgcggaccgaggataccgctgtgtactactgcgccagccaccagggcgtggcatactataactacgccatggacgtgtggggaagagggacgctcgtcaccgtgtcctccgggggcggtggatcgggtggaggaggaagcggtggcgggggcagcgaaatcgtgctgactcagagcccgggaactctttcactgtccccgggagaacgggccactctctcgtgccgggccacccagtccatcggctcctccttccttgcctggtaccagcagaggccaggacaggcgccccgcctgctgatctacggtgcttcccaacgcgccactggcattcctgaccggttcagcggcagagggtcgggaaccgatttcacactgaccatttcccgggtggagcccgaagattcggcagtctactactgtcagcattacgagtcctccccttcatggaccttcggtcaagggaccaaagtggagatcaagaccactaccccagcaccgaggccacccaccccggctcctaccatcgcctcccagcctctgtccctgcgtccggaggcatgtagacccgcagctggtggggccgtgcatacccggggtcttgacttcgcctgcgatatctacatttgggcccctctggctggtacttgcggggtcctgctgctttcactcgtgatcactctttactgtaagcgcggtcggaagaagctgctgtacatctttaagcaacccttcatgaggcctgtgcagactactcaagaggaggacggctgttcatgccggttcccagaggaggaggaaggcggctgcgaactgcgcgtgaaattcagccgcagcgcagatgctccagcctacaagcaggggcagaaccagctctacaacgaactcaatcttggtcggagagaggagtacgacgtgctggacaagcggagaggacgggacccagaaatgggcgggaagccgcgcagaaagaatccccaagagggcctgtacaacgagctccaaaaggataagatggcagaagcctatagcgagattggtatgaaaggggaacgcagaagaggcaaaggccacgacggactgtaccagggactcagcaccgccaccaaggacacctatgacgctcttcacatgcaggccctgccgcctcgg

SEQ ID NO: 1575 - protein, 241 aa, Artificial Sequence
  source: /note="Description of Artificial Sequence: Synthetic polypeptide"
EVQLVESGGGLVQPGGSLRLSCAASGFTFSSYAMSWVRQAPGKGLEWVSAISGSGGSTYYADSVKGRFTISRDNSKNTLYLQMNSLRAEDTAVYYCAKVVRDGMDVWGQGTTVTVSSGGGGSGGGGSGGGGSEIVLTQSPATLSLSPGERATLSCRASQSVSSSYLAWYQQKPGQAPRLLIYGASSRATGIPDRFSGNGSGTDFTLTISRLEPEDFAVYYCQQYGSPPRFTFGPGTKVDIK

SEQ ID NO: 1576 - DNA, 723 bp, Artificial Sequence
  source: /note="Description of Artificial Sequence: Synthetic polynucleotide"
gaggtgcagttggtcgaaagcgggggcgggcttgtgcagcctggcggatcactgcggctgtcctgcgcggcatcaggcttcacgttttcttcctacgccatgtcctgggtgcgccaggcccctggaaagggactggaatgggtgtccgcgatttcggggtccggcgggagcacctactacgccgattccgtgaagggccgcttcactatctcgcgggacaactccaagaacaccctctacctccaaatgaatagcctgcgggccgaggataccgccgtctactattgcgctaaggtcgtgcgcgacggaatggacgtgtggggacagggtaccaccgtgacagtgtcctcggggggaggcggtagcggcggaggaggaagcggtggtggaggttccgagattgtgctgactcaatcacccgcgaccctgagcctgtcccccggcgaaagggccactctgtcctgtcgggccagccaatcagtctcctcctcgtacctggcctggtaccagcagaagccaggacaggctccgagactccttatctatggcgcatcctcccgcgccaccggaatcccggataggttctcgggaaacggatcggggaccgacttcactctcaccatctcccggctggaaccggaggacttcgccgtgtactactgccagcagtacggcagcccgcctagattcactttcggccccggcaccaaagtggacatcaag

SEQ ID NO: 1577 - protein, 117 aa, Artificial Sequence
  source: /note="Description of Artificial Sequence: Synthetic polypeptide"
EVQLVESGGGLVQPGGSLRLSCAASGFTFSSYAMSWVRQAPGKGLEWVSAISGSGGSTYYADSVKGRFTISRDNSKNTLYLQMNSLRAEDTAVYYCAKVVRDGMDVWGQGTTVTVSS

SEQ ID NO: 1578 - protein, 109 aa, Artificial Sequence
  source: /note="Description of Artificial Sequence: Synthetic polypeptide"
EIVLTQSPATLSLSPGERATLSCRASQSVSSSYLAWYQQKPGQAPRLLIYGASSRATGIPDRFSGNGSGTDFTLTISRLEPEDFAVYYCQQYGSPPRFTFGPGTKVDIK

SEQ ID NO: 1579 - protein, 485 aa, Artificial Sequence
  source: /note="Description of Artificial Sequence: Synthetic polypeptide"
MALPVTALLLPLALLLHAARPEVQLVESGGGLVQPGGSLRLSCAASGFTFSSYAMSWVRQAPGKGLEWVSAISGSGGSTYYADSVKGRFTISRDNSKNTLYLQMNSLRAEDTAVYYCAKVVRDGMDVWGQGTTVTVSSGGGGSGGGGSGGGGSEIVLTQSPATLSLSPGERATLSCRASQSVSSSYLAWYQQKPGQAPRLLIYGASSRATGIPDRFSGNGSGTDFTLTISRLEPEDFAVYYCQQYGSPPRFTFGPGTKVDIKTTTPAPRPPTPAPTIASQPLSLRPEACRPAAGGAVHTRGLDFACDIYIWAPLAGTCGVLLLSLVITLYCKRGRKKLLYIFKQPFMRPVQTTQEEDGCSCRFPEEEEGGCELRVKFSRSADAPAYKQGQNQLYNELNLGRREEYDVLDKRRGRDPEMGGKPRRKNPQEGLYNELQKDKMAEAYSEIGMKGERRRGKGHDGLYQGLSTATKDTYDALHMQALPPR

SEQ ID NO: 1580 - DNA, 1455 bp, Artificial Sequence
  source: /note="Description of Artificial Sequence: Synthetic polynucleotide"
atggccctccctgtcaccgccctgctgcttccgctggctcttctgctccacgccgctcggcccgaggtgcagttggtcgaaagcgggggcgggcttgtgcagcctggcggatcactgcggctgtcctgcgcggcatcaggcttcacgttttcttcctacgccatgtcctgggtgcgccaggcccctggaaagggactggaatgggtgtccgcgatttcggggtccggcgggagcacctactacgccgattccgtgaagggccgcttcactatctcgcgggacaactccaagaacaccctctacctccaaatgaatagcctgcgggccgaggataccgccgtctactattgcgctaaggtcgtgcgcgacggaatggacgtgtggggacagggtaccaccgtgacagtgtcctcggggggaggcggtagcggcggaggaggaagcggtggtggaggttccgagattgtgctgactcaatcacccgcgaccctgagcctgtcccccggcgaaagggccactctgtcctgtcgggccagccaatcagtctcctcctcgtacctggcctggtaccagcagaagccaggacaggctccgagactccttatctatggcgcatcctcccgcgccaccggaatcccggataggttctcgggaaacggatcggggaccgacttcactctcaccatctcccggctggaaccggaggacttcgccgtgtactactgccagcagtacggcagcccgcctagattcactttcggccccggcaccaaagtggacatcaagaccactaccccagcaccgaggccacccaccccggctcctaccatcgcctcccagcctctgtccctgcgtccggaggcatgtagacccgcagctggtggggccgtgcatacccggggtcttgacttcgcctgcgatatctacatttgggcccctctggctggtacttgcggggtcctgctgctttcactcgtgatcactctttactgtaagcgcggtcggaagaagctgctgtacatctttaagcaacccttcatgaggcctgtgcagactactcaagaggaggacggctgttcatgccggttcccagaggaggaggaaggcggctgcgaactgcgcgtgaaattcagccgcagcgcagatgctccagcctacaagcaggggcagaaccagctctacaacgaactcaatcttggtcggagagaggagtacgacgtgctggacaagcggagaggacgggacccagaaatgggcgggaagccgcgcagaaagaatccccaagagggcctgtacaacgagctccaaaaggataagatggcagaagcctatagcgagattggtatgaaaggggaacgcagaagaggcaaaggccacgacggactgtaccagggactcagcaccgccaccaaggacacctatgacgctcttcacatgcaggccctgccgcctcgg

SEQ ID NO: 1581 - protein, 242 aa, Artificial Sequence
  source: /note="Description of Artificial Sequence: Synthetic polypeptide"
EVQLLESGGGLVQPGGSLRLSCAASGFTFSSYAMSWVRQAPGKGLEWVSAISGSGGSTYYADSVKGRFTISRDNSKNTLYLQMNSLRAEDTAVYYCAKIPQTGTFDYWGQGTLVTVSSGGGGSGGGGSGGGGSEIVLTQSPGTLSLSPGERATLSCRASQSVSSSYLAWYQQRPGQAPRLLIYGASSRATGIPDRFSGSGSGTDFTLTISRLEPEDFAVYYCQHYGSSPSWTFGQGTRLEIK

SEQ ID NO: 1582 - DNA, 726 bp, Artificial Sequence
  source: /note="Description of Artificial Sequence: Synthetic polynucleotide"
gaagtgcagctgctggagtccggcggtggattggtgcaaccggggggatcgctcagactgtcctgtgcggcgtcaggcttcaccttctcgagctacgccatgtcatgggtcagacaggcccctggaaagggtctggaatgggtgtccgccatttccgggagcgggggatctacatactacgccgatagcgtgaagggccgcttcaccatttcccgggacaactccaagaacactctctatctgcaaatgaactccctccgcgctgaggacactgccgtgtactactgcgccaaaatccctcagaccggcaccttcgactactggggacaggggactctggtcaccgtcagcagcggtggcggaggttcggggggaggaggaagcggcggcggagggtccgagattgtgctgacccagtcacccggcactttgtccctgtcgcctggagaaagggccaccctttcctgccgggcatcccaatccgtgtcctcctcgtacctggcctggtaccagcagaggcccggacaggccccacggcttctgatctacggagcaagcagccgcgcgaccggtatcccggaccggttttcgggctcgggctcaggaactgacttcaccctcaccatctcccgcctggaacccgaagatttcgctgtgtattactgccagcactacggcagctccccgtcctggacgttcggccagggaactcggctggagatcaag

SEQ ID NO: 1583 - protein, 118 aa, Artificial Sequence
  source: /note="Description of Artificial Sequence: Synthetic polypeptide"
EVQLLESGGGLVQPGGSLRLSCAASGFTFSSYAMSWVRQAPGKGLEWVSAISGSGGSTYYADSVKGRFTISRDNSKNTLYLQMNSLRAEDTAVYYCAKIPQTGTFDYWGQGTLVTVSS

SEQ ID NO: 1584 - protein, 109 aa, Artificial Sequence
  source: /note="Description of Artificial Sequence: Synthetic polypeptide"
EIVLTQSPGTLSLSPGERATLSCRASQSVSSSYLAWYQQRPGQAPRLLIYGASSRATGIPDRFSGSGSGTDFTLTISRLEPEDFAVYYCQHYGSSPSWTFGQGTRLEIK

SEQ ID NO: 1585 - protein, 486 aa, Artificial Sequence
  source: /note="Description of Artificial Sequence: Synthetic polypeptide"
MALPVTALLLPLALLLHAARPEVQLLESGGGLVQPGGSLRLSCAASGFTFSSYAMSWVRQAPGKGLEWVSAISGSGGSTYYADSVKGRFTISRDNSKNTLYLQMNSLRAEDTAVYYCAKIPQTGTFDYWGQGTLVTVSSGGGGSGGGGSGGGGSEIVLTQSPGTLSLSPGERATLSCRASQSVSSSYLAWYQQRPGQAPRLLIYGASSRATGIPDRFSGSGSGTDFTLTISRLEPEDFAVYYCQHYGSSPSWTFGQGTRLEIKTTTPAPRPPTPAPTIASQPLSLRPEACRPAAGGAVHTRGLDFACDIYIWAPLAGTCGVLLLSLVITLYCKRGRKKLLYIFKQPFMRPVQTTQEEDGCSCRFPEEEEGGCELRVKFSRSADAPAYKQGQNQLYNELNLGRREEYDVLDKRRGRDPEMGGKPRRKNPQEGLYNELQKDKMAEAYSEIGMKGERRRGKGHDGLYQGLSTATKDTYDALHMQALPPR

SEQ ID NO: 1586 - DNA, 1458 bp, Artificial Sequence
  source: /note="Description of Artificial Sequence: Synthetic polynucleotide"
atggccctccctgtcaccgccctgctgcttccgctggctcttctgctccacgccgctcggcccgaagtgcagctgctggagtccggcggtggattggtgcaaccggggggatcgctcagactgtcctgtgcggcgtcaggcttcaccttctcgagctacgccatgtcatgggtcagacaggcccctggaaagggtctggaatgggtgtccgccatttccgggagcgggggatctacatactacgccgatagcgtgaagggccgcttcaccatttcccgggacaactccaagaacactctctatctgcaaatgaactccctccgcgctgaggacactgccgtgtactactgcgccaaaatccctcagaccggcaccttcgactactggggacaggggactctggtcaccgtcagcagcggtggcggaggttcggggggaggaggaagcggcggcggagggtccgagattgtgctgacccagtcacccggcactttgtccctgtcgcctggagaaagggccaccctttcctgccgggcatcccaatccgtgtcctcctcgtacctggcctggtaccagcagaggcccggacaggccccacggcttctgatctacggagcaagcagccgcgcgaccggtatcccggaccggttttcgggctcgggctcaggaactgacttcaccctcaccatctcccgcctggaacccgaagatttcgctgtgtattactgccagcactacggcagctccccgtcctggacgttcggccagggaactcggctggagatcaagaccactaccccagcaccgaggccacccaccccggctcctaccatcgcctcccagcctctgtccctgcgtccggaggcatgtagacccgcagctggtggggccgtgcatacccggggtcttgacttcgcctgcgatatctacatttgggcccctctggctggtacttgcggggtcctgctgctttcactcgtgatcactctttactgtaagcgcggtcggaagaagctgctgtacatctttaagcaacccttcatgaggcctgtgcagactactcaagaggaggacggctgttcatgccggttcccagaggaggaggaaggcggctgcgaactgcgcgtgaaattcagccgcagcgcagatgctccagcctacaagcaggggcagaaccagctctacaacgaactcaatcttggtcggagagaggagtacgacgtgctggacaagcggagaggacgggacccagaaatgggcgggaagccgcgcagaaagaatccccaagagggcctgtacaacgagctccaaaaggataagatggcagaagcctatagcgagattggtatgaaaggggaacgcagaagaggcaaaggccacgacggactgtaccagggactcagcaccgccaccaaggacacctatgacgctcttcacatgcaggccctgccgcctcgg

SEQ ID NO: 1587 - protein, 248 aa, Artificial Sequence
  source: /note="Description of Artificial Sequence: Synthetic polypeptide"
EVQLVETGGGLVQPGGSLRLSCAASGFTFSSYAMSWVRQAPGKGLEWVSAISGSGGSTYYADSVKGRFTMSRENDKNSVFLQMNSLRVEDTGVYYCARANYKRELRYYYGMDVWGQGTMVTVSSGGGGSGGGGSGGGGSEIVMTQSPGTLSLSPGESATLSCRASQRVASNYLAWYQHKPGQAPSLLISGASSRATGVPDRFSGSGSGTDFTLAISRLEPEDSAVYYCQHYDSSPSWTFGQGTKVEIK

SEQ ID NO: 1588 - DNA, 744 bp, Artificial Sequence
  source: /note="Description of Artificial Sequence: Synthetic polynucleotide"
gaagtgcaactggtggaaaccggtggaggactcgtgcagcctggcggcagcctccggctgagctgcgccgcttcgggattcaccttttcctcctacgcgatgtcttgggtcagacaggcccccggaaaggggctggaatgggtgtcagccatctccggctccggcggatcaacgtactacgccgactccgtgaaaggccggttcaccatgtcgcgcgagaatgacaagaactccgtgttcctgcaaatgaactccctgagggtggaggacaccggagtgtactattgtgcgcgcgccaactacaagagagagctgcggtactactacggaatggacgtctggggacagggaactatggtgaccgtgtcatccggtggagggggaagcggcggtggaggcagcgggggcgggggttcagaaattgtcatgacccagtccccgggaactctttccctctcccccggggaatccgcgactttgtcctgccgggccagccagcgcgtggcctcgaactacctcgcatggtaccagcataagccaggccaagccccttccctgctgatttccggggctagcagccgcgccactggcgtgccggataggttctcgggaagcggctcgggtaccgatttcaccctggcaatctcgcggctggaaccggaggattcggccgtgtactactgccagcactatgactcatccccctcctggacattcggacagggcaccaaggtcgagatcaag

SEQ ID NO: 1589 - protein, 124 aa, Artificial Sequence
  source: /note="Description of Artificial Sequence: Synthetic polypeptide"
EVQLVETGGGLVQPGGSLRLSCAASGFTFSSYAMSWVRQAPGKGLEWVSAISGSGGSTYYADSVKGRFTMSRENDKNSVFLQMNSLRVEDTGVYYCARANYKRELRYYYGMDVWGQGTMVTVSS

SEQ ID NO: 1590 - protein, 109 aa, Artificial Sequence
  source: /note="Description of Artificial Sequence: Synthetic polypeptide"
EIVMTQSPGTLSLSPGESATLSCRASQRVASNYLAWYQHKPGQAPSLLISGASSRATGVPDRFSGSGSGTDFTLAISRLEPEDSAVYYCQHYDSSPSWTFGQGTKVEIK

SEQ ID NO: 1591 - protein, 492 aa, Artificial Sequence
  source: /note="Description of Artificial Sequence: Synthetic polypeptide"
MALPVTALLLPLALLLHAARPEVQLVETGGGLVQPGGSLRLSCAASGFTFSSYAMSWVRQAPGKGLEWVSAISGSGGSTYYADSVKGRFTMSRENDKNSVFLQMNSLRVEDTGVYYCARANYKRELRYYYGMDVWGQGTMVTVSSGGGGSGGGGSGGGGSEIVMTQSPGTLSLSPGESATLSCRASQRVASNYLAWYQHKPGQAPSLLISGASSRATGVPDRFSGSGSGTDFTLAISRLEPEDSAVYYCQHYDSSPSWTFGQGTKVEIKTTTPAPRPPTPAPTIASQPLSLRPEACRPAAGGAVHTRGLDFACDIYIWAPLAGTCGVLLLSLVITLYCKRGRKKLLYIFKQPFMRPVQTTQEEDGCSCRFPEEEEGGCELRVKFSRSADAPAYKQGQNQLYNELNLGRREEYDVLDKRRGRDPEMGGKPRRKNPQEGLYNELQKDKMAEAYSEIGMKGERRRGKGHDGLYQGLSTATKDTYDALHMQALPPR

SEQ ID NO: 1592 - DNA, 1476 bp, Artificial Sequence
  source: /note="Description of Artificial Sequence: Synthetic polynucleotide"
atggccctccctgtcaccgccctgctgcttccgctggctcttctgctccacgccgctcggcccgaagtgcaactggtggaaaccggtggaggactcgtgcagcctggcggcagcctccggctgagctgcgccgcttcgggattcaccttttcctcctacgcgatgtcttgggtcagacaggcccccggaaaggggctggaatgggtgtcagccatctccggctccggcggatcaacgtactacgccgactccgtgaaaggccggttcaccatgtcgcgcgagaatgacaagaactccgtgttcctgcaaatgaactccctgagggtggaggacaccggagtgtactattgtgcgcgcgccaactacaagagagagctgcggtactactacggaatggacgtctggggacagggaactatggtgaccgtgtcatccggtggagggggaagcggcggtggaggcagcgggggcgggggttcagaaattgtcatgacccagtccccgggaactctttccctctcccccggggaatccgcgactttgtcctgccgggccagccagcgcgtggcctcgaactacctcgcatggtaccagcataagccaggccaagccccttccctgctgatttccggggctagcagccgcgccactggcgtgccggataggttctcgggaagcggctcgggtaccgatttcaccctggcaatctcgcggctggaaccggaggattcggccgtgtactactgccagcactatgactcatccccctcctggacattcggacagggcaccaaggtcgagatcaagaccactaccccagcaccgaggccacccaccccggctcctaccatcgcctcccagcctctgtccctgcgtccggaggcatgtagacccgcagctggtggggccgtgcatacccggggtcttgacttcgcctgcgatatctacatttgggcccctctggctggtacttgcggggtcctgctgctttcactcgtgatcactctttactgtaagcgcggtcggaagaagctgctgtacatctttaagcaacccttcatgaggcctgtgcagactactcaagaggaggacggctgttcatgccggttcccagaggaggaggaaggcggctgcgaactgcgcgtgaaattcagccgcagcgcagatgctccagcctacaagcaggggcagaaccagctctacaacgaactcaatcttggtcggagagaggagtacgacgtgctggacaagcggagaggacgggacccagaaatgggcgggaagccgcgcagaaagaatccccaagagggcctgtacaacgagctccaaaaggataagatggcagaagcctatagcgagattggtatgaaaggggaacgcagaagaggcaaaggccacgacggactgtaccagggactcagcaccgccaccaaggacacctatgacgctcttcacatgcaggccctgccgcctcgg

SEQ ID NO: 1593 - protein, 244 aa, Artificial Sequence
  source: /note="Description of Artificial Sequence: Synthetic polypeptide"
EVQLLETGGGLVQPGGSLRLSCAASGFSFSSYAMSWVRQAPGKGLEWVSAISGSGGSTYYADSVKGRFTISRDNSKNTLYLQMNSLRAEDTAVYYCAKALVGATGAFDIWGQGTLVTVSSGGGGSGGGGSGGGGSEIVLTQSPGTLSLSPGERATLSCRASQSLSSNFLAWYQQKPGQAPGLLIYGASNWATGTPDRFSGSGSGTDFTLTITRLEPEDFAVYYCQYYGTSPMYTFGQGTKVEIK

SEQ ID NO: 1594 - DNA, 732 bp, Artificial Sequence
  source: /note="Description of Artificial Sequence: Synthetic polynucleotide"
gaagtgcagctgctcgaaaccggtggagggctggtgcagccagggggctccctgaggctttcatgcgccgctagcggattctccttctcctcttacgccatgtcgtgggtccgccaagcccctggaaaaggcctggaatgggtgtccgcgatttccgggagcggaggttcgacctattacgccgactccgtgaagggccgctttaccatctcccgggataactccaagaacactctgtacctccaaatgaactcgctgagagccgaggacaccgccgtgtattactgcgcgaaggcgctggtcggcgcgactggggcattcgacatctggggacagggaactcttgtgaccgtgtcgagcggaggcggcggctccggcggaggagggagcgggggcggtggttccgaaatcgtgttgactcagtccccgggaaccctgagcttgtcacccggggagcgggccactctctcctgtcgcgcctcccaatcgctctcatccaatttcctggcctggtaccagcagaagcccggacaggccccgggcctgctcatctacggcgcttcaaactgggcaacgggaacccctgatcggttcagcggaagcggatcgggtactgactttaccctgaccatcaccagactggaaccggaggacttcgccgtgtactactgccagtactacggcacctcccccatgtacacattcggacagggtaccaaggtcgagattaag

SEQ ID NO: 1595 - protein, 120 aa, Artificial Sequence
  source: /note="Description of Artificial Sequence: Synthetic polypeptide"
EVQLLETGGGLVQPGGSLRLSCAASGFSFSSYAMSWVRQAPGKGLEWVSAISGSGGSTYYADSVKGRFTISRDNSKNTLYLQMNSLRAEDTAVYYCAKALVGATGAFDIWGQGTLVTVSS

SEQ ID NO: 1596 - protein, 109 aa, Artificial Sequence
  source: /note="Description of Artificial Sequence: Synthetic polypeptide"
EIVLTQSPGTLSLSPGERATLSCRASQSLSSNFLAWYQQKPGQAPGLLIYGASNWATGTPDRFSGSGSGTDFTLTITRLEPEDFAVYYCQYYGTSPMYTFGQGTKVEIK

SEQ ID NO: 1597 - protein, 488 aa, Artificial Sequence
  source: /note="Description of Artificial Sequence: Synthetic polypeptide"
MALPVTALLLPLALLLHAARPEVQLLETGGGLVQPGGSLRLSCAASGFSFSSYAMSWVRQAPGKGLEWVSAISGSGGSTYYADSVKGRFTISRDNSKNTLYLQMNSLRAEDTAVYYCAKALVGATGAFDIWGQGTLVTVSSGGGGSGGGGSGGGGSEIVLTQSPGTLSLSPGERATLSCRASQSLSSNFLAWYQQKPGQAPGLLIYGASNWATGTPDRFSGSGSGTDFTLTITRLEPEDFAVYYCQYYGTSPMYTFGQGTKVEIKTTTPAPRPPTPAPTIASQPLSLRPEACRPAAGGAVHTRGLDFACDIYIWAPLAGTCGVLLLSLVITLYCKRGRKKLLYIFKQPFMRPVQTTQEEDGCSCRFPEEEEGGCELRVKFSRSADAPAYKQGQNQLYNELNLGRREEYDVLDKRRGRDPEMGGKPRRKNPQEGLYNELQKDKMAEAYSEIGMKGERRRGKGHDGLYQGLSTATKDTYDALHMQALPPR

SEQ ID NO: 1598 - DNA, 1464 bp, Artificial Sequence
  source: /note="Description of Artificial Sequence: Synthetic polynucleotide"
atggccctccctgtcaccgccctgctgcttccgctggctcttctgctccacgccgctcggcccgaagtgcagctgctcgaaaccggtggagggctggtgcagccagggggctccctgaggctttcatgcgccgctagcggattctccttctcctcttacgccatgtcgtgggtccgccaagcccctggaaaaggcctggaatgggtgtccgcgatttccgggagcggaggttcgacctattacgccgactccgtgaagggccgctttaccatctcccgggataactccaagaacactctgtacctccaaatgaactcgctgagagccgaggacaccgccgtgtattactgcgcgaaggcgctggtcggcgcgactggggcattcgacatctggggacagggaactcttgtgaccgtgtcgagcggaggcggcggctccggcggaggagggagcgggggcggtggttccgaaatcgtgttgactcagtccccgggaaccctgagcttgtcacccggggagcgggccactctctcctgtcgcgcctcccaatcgctctcatccaatttcctggcctggtaccagcagaagcccggacaggccccgggcctgctcatctacggcgcttcaaactgggcaacgggaacccctgatcggttcagcggaagcggatcgggtactgactttaccctgaccatcaccagactggaaccggaggacttcgccgtgtactactgccagtactacggcacctcccccatgtacacattcggacagggtaccaaggtcgagattaagaccactaccccagcaccgaggccacccaccccggctcctaccatcgcctcccagcctctgtccctgcgtccggaggcatgtagacccgcagctggtggggccgtgcatacccggggtcttgacttcgcctgcgatatctacatttgggcccctctggctggtacttgcggggtcctgctgctttcactcgtgatcactctttactgtaagcgcggtcggaagaagctgctgtacatctttaagcaacccttcatgaggcctgtgcagactactcaagaggaggacggctgttcatgccggttcccagaggaggaggaaggcggctgcgaactgcgcgtgaaattcagccgcagcgcagatgctccagcctacaagcaggggcagaaccagctctacaacgaactcaatcttggtcggagagaggagtacgacgtgctggacaagcggagaggacgggacccagaaatgggcgggaagccgcgcagaaagaatccccaagagggcctgtacaacgagctccaaaaggataagatggcagaagcctatagcgagattggtatgaaaggggaacgcagaagaggcaaaggccacgacggactgtaccagggactcagcaccgccaccaaggacacctatgacgctcttcacatgcaggccctgccgcctcgg

SEQ ID NO: 1599 - protein, 244 aa, Artificial Sequence
  source: /note="Description of Artificial Sequence: Synthetic polypeptide"
EVQLLESGGGLVQPGGSLRLSCAASGFTFSSYAMSWVRQAPGKGLEWVSAISGSGGSTYYADSVKGRFTISRDNSKNTLYLQMNSLRAEDTAVYYCVLWFGEGFDPWGQGTLVTVSSGGGGSGGGGSGGGGSDIVLTQSPLSLPVTPGEPASISCRSSQSLLHSNGYNYLDWYLQKPGQSPQLLIYLGSNRASGVPDRFSGSGSGTDFTLKISRVEAEDVGVYYCMQALQTPLTFGGGTKVDIK

SEQ ID NO: 1600 - DNA, 733 bp, Artificial Sequence
  source: /note="Description of Artificial Sequence: Synthetic polynucleotide"
gaagtgcagctgcttgagagcggtggaggtctggtgcagcccgggggatcactgcgcctgtcctgtgccgcgtccggtttcactttctcctcgtacgccatgtcgtgggtcagacaggcaccgggaaagggactggaatgggtgtcagccatttcgggttcggggggcagcacctactacgctgactccgtgaagggccggttcaccatttcccgcgacaactccaagaacaccttgtacctccaaatgaactccctgcgggccgaagataccgccgtgtattactgcgtgctgtggttcggagagggattcgacccgtggggacaaggaacactcgtgactgtgtcatccggcggaggcggcagcggtggcggcggttccggcggcggcggatctgacatcgtgttgacccagtcccctctgagcctgccggtcactcctggcgaaccagccagcatctcctgccggtcgagccagtccctcctgcactccaatgggtacaactacctcgattggtatctgcaaaagccgggccagagcccccagctgctgatctaccttgggtcaaaccgcgcttccggggtgcctgatagattctccgggtccgggagcggaaccgactttaccctgaaaatctcgagggtggaggccgaggacgtcggagtgtactactgcatgcaggcgctccagactcccctgaccttcggaggaggaacgaaggtcgacatcaaga

SEQ ID NO: 1601 - protein, 117 aa, Artificial Sequence
  source: /note="Description of Artificial Sequence: Synthetic polypeptide"
EVQLLESGGGLVQPGGSLRLSCAASGFTFSSYAMSWVRQAPGKGLEWVSAISGSGGSTYYADSVKGRFTISRDNSKNTLYLQMNSLRAEDTAVYYCVLWFGEGFDPWGQGTLVTVSS

SEQ ID NO: 1602 - protein, 112 aa, Artificial Sequence
  source: /note="Description of Artificial Sequence: Synthetic polypeptide"
DIVLTQSPLSLPVTPGEPASISCRSSQSLLHSNGYNYLDWYLQKPGQSPQLLIYLGSNRASGVPDRFSGSGSGTDFTLKISRVEAEDVGVYYCMQALQTPLTFGGGTKVDIK

SEQ ID NO: 1603 - protein, 488 aa, Artificial Sequence
  source: /note="Description of Artificial Sequence: Synthetic polypeptide"
MALPVTALLLPLALLLHAARPEVQLLESGGGLVQPGGSLRLSCAASGFTFSSYAMSWVRQAPGKGLEWVSAISGSGGSTYYADSVKGRFTISRDNSKNTLYLQMNSLRAEDTAVYYCVLWFGEGFDPWGQGTLVTVSSGGGGSGGGGSGGGGSDIVLTQSPLSLPVTPGEPASISCRSSQSLLHSNGYNYLDWYLQKPGQSPQLLIYLGSNRASGVPDRFSGSGSGTDFTLKISRVEAEDVGVYYCMQALQTPLTFGGGTKVDIKTTTPAPRPPTPAPTIASQPLSLRPEACRPAAGGAVHTRGLDFACDIYIWAPLAGTCGVLLLSLVITLYCKRGRKKLLYIFKQPFMRPVQTTQEEDGCSCRFPEEEEGGCELRVKFSRSADAPAYKQGQNQLYNELNLGRREEYDVLDKRRGRDPEMGGKPRRKNPQEGLYNELQKDKMAEAYSEIGMKGERRRGKGHDGLYQGLSTATKDTYDALHMQALPPR

SEQ ID NO: 1604 - DNA, 1464 bp, Artificial Sequence
  source: /note="Description of Artificial Sequence: Synthetic polynucleotide"
atggccctccctgtcaccgccctgctgcttccgctggctcttctgctccacgccgctcggcccgaagtgcagctgcttgagagcggtggaggtctggtgcagcccgggggatcactgcgcctgtcctgtgccgcgtccggtttcactttctcctcgtacgccatgtcgtgggtcagacaggcaccgggaaagggactggaatgggtgtcagccatttcgggttcggggggcagcacctactacgctgactccgtgaagggccggttcaccatttcccgcgacaactccaagaacaccttgtacctccaaatgaactccctgcgggccgaagataccgccgtgtattactgcgtgctgtggttcggagagggattcgacccgtggggacaaggaacactcgtgactgtgtcatccggcggaggcggcagcggtggcggcggttccggcggcggcggatctgacatcgtgttgacccagtcccctctgagcctgccggtcactcctggcgaaccagccagcatctcctgccggtcgagccagtccctcctgcactccaatgggtacaactacctcgattggtatctgcaaaagccgggccagagcccccagctgctgatctaccttgggtcaaaccgcgcttccggggtgcctgatagattctccgggtccgggagcggaaccgactttaccctgaaaatctcgagggtggaggccgaggacgtcggagtgtactactgcatgcaggcgctccagactcccctgaccttcggaggaggaacgaaggtcgacatcaagaccactaccccagcaccgaggccacccaccccggctcctaccatcgcctcccagcctctgtccctgcgtccggaggcatgtagacccgcagctggtggggccgtgcatacccggggtcttgacttcgcctgcgatatctacatttgggcccctctggctggtacttgcggggtcctgctgctttcactcgtgatcactctttactgtaagcgcggtcggaagaagctgctgtacatctttaagcaacccttcatgaggcctgtgcagactactcaagaggaggacggctgttcatgccggttcccagaggaggaggaaggcggctgcgaactgcgcgtgaaattcagccgcagcgcagatgctccagcctacaagcaggggcagaaccagctctacaacgaactcaatcttggtcggagagaggagtacgacgtgctggacaagcggagaggacgggacccagaaatgggcgggaagccgcgcagaaagaatccccaagagggcctgtacaacgagctccaaaaggataagatggcagaagcctatagcgagattggtatgaaaggggaacgcagaagaggcaaaggccacgacggactgtaccagggactcagcaccgccaccaaggacacctatgacgctcttcacatgcaggccctgccgcctcgg

SEQ ID NO: 1605 - protein, 251 aa, Artificial Sequence
  source: /note="Description of Artificial Sequence: Synthetic polypeptide"
QVQLVESGGGLVQPGGSLRLSCAASGFTFSSYAMSWVRQAPGKGLEWVSAISGSGGSTYYADSVKGRFTISRDNSKNTLYLQMNSLRAEDTAVYYCAKVGYDSSGYYRDYYGMDVWGQGTTVTVSSGGGGSGGGGSGGGGSEIVLTQSPGTLSLSPGERATLSCRASQSVSSSYLAWYQQKPGQAPRLLIYGTSSRATGISDRFSGSGSGTDFTLTISRLEPEDFAVYYCQHYGNSPPKFTFGPGTKLEIK

SEQ ID NO: 1606 - DNA, 753 bp, Artificial Sequence
  source: /note="Description of Artificial Sequence: Synthetic polynucleotide"
caagtgcagctcgtggagtcaggcggaggactggtgcagcccgggggctccctgagactttcctgcgcggcatcgggttttaccttctcctcctatgctatgtcctgggtgcgccaggccccgggaaagggactggaatgggtgtccgcaatcagcggtagcgggggctcaacatactacgccgactccgtcaagggtcgcttcactatttcccgggacaactccaagaataccctgtacctccaaatgaacagcctcagggccgaggatactgccgtgtactactgcgccaaagtcggatacgatagctccggttactaccgggactactacggaatggacgtgtggggacagggcaccaccgtgaccgtgtcaagcggcggaggcggttcaggagggggaggctccggcggtggagggtccgaaatcgtcctgactcagtcgcctggcactctgtcgttgtccccgggggagcgcgctaccctgtcgtgtcgggcgtcgcagtccgtgtcgagctcctacctcgcgtggtaccagcagaagcccggacaggcccctagacttctgatctacggcacttcttcacgcgccaccgggatcagcgacaggttcagcggctccggctccgggaccgacttcaccctgaccattagccggctggagcctgaagatttcgccgtgtattactgccaacactacggaaactcgccgccaaagttcacgttcggacccggaaccaagctggaaatcaag

SEQ ID NO: 1607 - protein, 126 aa, Artificial Sequence
  source: /note="Description of Artificial Sequence: Synthetic polypeptide"
QVQLVESGGGLVQPGGSLRLSCAASGFTFSSYAMSWVRQAPGKGLEWVSAISGSGGSTYYADSVKGRFTISRDNSKNTLYLQMNSLRAEDTAVYYCAKVGYDSSGYYRDYYGMDVWGQGTTVTVSS

SEQ ID NO: 1608 - protein, 110 aa, Artificial Sequence
  source: /note="Description of Artificial Sequence: Synthetic polypeptide"
EIVLTQSPGTLSLSPGERATLSCRASQSVSSSYLAWYQQKPGQAPRLLIYGTSSRATGISDRFSGSGSGTDFTLTISRLEPEDFAVYYCQHYGNSPPKFTFGPGTKLEIK

SEQ ID NO: 1609 - protein, 495 aa, Artificial Sequence
  source: /note="Description of Artificial Sequence: Synthetic polypeptide"
MALPVTALLLPLALLLHAARPQVQLVESGGGLVQPGGSLRLSCAASGFTFSSYAMSWVRQAPGKGLEWVSAISGSGGSTYYADSVKGRFTISRDNSKNTLYLQMNSLRAEDTAVYYCAKVGYDSSGYYRDYYGMDVWGQGTTVTVSSGGGGSGGGGSGGGGSEIVLTQSPGTLSLSPGERATLSCRASQSVSSSYLAWYQQKPGQAPRLLIYGTSSRATGISDRFSGSGSGTDFTLTISRLEPEDFAVYYCQHYGNSPPKFTFGPGTKLEIKTTTPAPRPPTPAPTIASQPLSLRPEACRPAAGGAVHTRGLDFACDIYIWAPLAGTCGVLLLSLVITLYCKRGRKKLLYIFKQPFMRPVQTTQEEDGCSCRFPEEEEGGCELRVKFSRSADAPAYKQGQNQLYNELNLGRREEYDVLDKRRGRDPEMGGKPRRKNPQEGLYNELQKDKMAEAYSEIGMKGERRRGKGHDGLYQGLSTATKDTYDALHMQALPPR

SEQ ID NO: 1610 - DNA, 1485 bp, Artificial Sequence
  source: /note="Description of Artificial Sequence: Synthetic polynucleotide"
atggccctccctgtcaccgccctgctgcttccgctggctcttctgctccacgccgctcggccccaagtgcagctcgtggagtcaggcggaggactggtgcagcccgggggctccctgagactttcctgcgcggcatcgggttttaccttctcctcctatgctatgtcctgggtgcgccaggccccgggaaagggactggaatgggtgtccgcaatcagcggtagcgggggctcaacatactacgccgactccgtcaagggtcgcttcactatttcccgggacaactccaagaataccctgtacctccaaatgaacagcctcagggccgaggatactgccgtgtactactgcgccaaagtcggatacgatagctccggttactaccgggactactacggaatggacgtgtggggacagggcaccaccgtgaccgtgtcaagcggcggaggcggttcaggagggggaggctccggcggtggagggtccgaaatcgtcctgactcagtcgcctggcactctgtcgttgtccccgggggagcgcgctaccctgtcgtgtcgggcgtcgcagtccgtgtcgagctcctacctcgcgtggtaccagcagaagcccggacaggcccctagacttctgatctacggcacttcttcacgcgccaccgggatcagcgacaggttcagcggctccggctccgggaccgacttcaccctgaccattagccggctggagcctgaagatttcgccgtgtattactgccaacactacggaaactcgccgccaaagttcacgttcggacccggaaccaagctggaaatcaagaccactaccccagcaccgaggccacccaccccggctcctaccatcgcctcccagcctctgtccctgcgtccggaggcatgtagacccgcagctggtggggccgtgcatacccggggtcttgacttcgcctgcgatatctacatttgggcccctctggctggtacttgcggggtcctgctgctttcactcgtgatcactctttactgtaagcgcggtcggaagaagctgctgtacatctttaagcaacccttcatgaggcctgtgcagactactcaagaggaggacggctgttcatgccggttcccagaggaggaggaaggcggctgcgaactgcgcgtgaaattcagccgcagcgcagatgctccagcctacaagcaggggcagaaccagctctacaacgaactcaatcttggtcggagagaggagtacgacgtgctggacaagcggagaggacgggacccagaaatgggcgggaagccgcgcagaaagaatccccaagagggcctgtacaacgagctccaaaaggataagatggcagaagcctatagcgagattggtatgaaaggggaacgcagaagaggcaaaggccacgacggactgtaccagggactcagcaccgccaccaaggacacctatgacgctcttcacatgcaggccctgccgcctcgg

SEQ ID NO: 1611 - protein, 246 aa, Artificial Sequence
  source: /note="Description of Artificial Sequence: Synthetic polypeptide"
EVQLVESGGGLVQPGGSLRLSCAASGFTFSSYAMSWVRQAPGKGLEWVSAISGSGGSTYYADSVKGRFTISRDNSKNTLYLQMNSLRAEDTAVYYCAKMGWSSGYLGAFDIWGQGTTVTVSSGGGGSGGGGSGGGGSEIVLTQSPGTLSLSPGERATLSCRASQSVASSFLAWYQQKPGQAPRLLIYGASGRATGIPDRFSGSGSGTDFTLTISRLEPEDFAVYYCQHYGGSPRLTFGGGTKVDIK

SEQ ID NO: 1612 - DNA, 739 bp, Artificial Sequence
  source: /note="Description of Artificial Sequence: Synthetic polynucleotide"
gaagtccaactggtggagtccgggggagggctcgtgcagcccggaggcagccttcggctgtcgtgcgccgcctccgggttcacgttctcatcctacgcgatgtcgtgggtcagacaggcaccaggaaagggactggaatgggtgtccgccattagcggctccggcggtagcacctactatgccgactcagtgaagggaaggttcactatctcccgcgacaacagcaagaacaccctgtacctccaaatgaactctctgcgggccgaggataccgcggtgtactattgcgccaagatgggttggtccagcggatacttgggagccttcgacatttggggacagggcactactgtgaccgtgtcctccgggggtggcggatcgggaggcggcggctcgggtggagggggttccgaaatcgtgttgacccagtcaccgggaaccctctcgctgtccccgggagaacgggctacactgtcatgtagagcgtcccagtccgtggcttcctcgttcctggcctggtaccagcagaagccgggacaggcaccccgcctgctcatctacggagccagcggccgggcgaccggcatccctgaccgcttctccggttccggctcgggcaccgactttactctgaccattagcaggcttgagcccgaggattttgccgtgtactactgccaacactacggggggagccctcgcctgaccttcggaggcggaactaaggtcgatatcaaaa

SEQ ID NO: 1613 - protein, 122 aa, Artificial Sequence
  source: /note="Description of Artificial Sequence: Synthetic polypeptide"
EVQLVESGGGLVQPGGSLRLSCAASGFTFSSYAMSWVRQAPGKGLEWVSAISGSGGSTYYADSVKGRFTISRDNSKNTLYLQMNSLRAEDTAVYYCAKMGWSSGYLGAFDIWGQGTTVTVSS

SEQ ID NO: 1614 - protein, 109 aa, Artificial Sequence
  source: /note="Description of Artificial Sequence: Synthetic polypeptide"
EIVLTQSPGTLSLSPGERATLSCRASQSVASSFLAWYQQKPGQAPRLLIYGASGRATGIPDRFSGSGSGTDFTLTISRLEPEDFAVYYCQHYGGSPRLTFGGGTKVDIK

SEQ ID NO: 1615 - protein, 490 aa, Artificial Sequence
  source: /note="Description of Artificial Sequence: Synthetic polypeptide"
MALPVTALLLPLALLLHAARPEVQLVESGGGLVQPGGSLRLSCAASGFTFSSYAMSWVRQAPGKGLEWVSAISGSGGSTYYADSVKGRFTISRDNSKNTLYLQMNSLRAEDTAVYYCAKMGWSSGYLGAFDIWGQGTTVTVSSGGGGSGGGGSGGGGSEIVLTQSPGTLSLSPGERATLSCRASQSVASSFLAWYQQKPGQAPRLLIYGASGRATGIPDRFSGSGSGTDFTLTISRLEPEDFAVYYCQHYGGSPRLTFGGGTKVDIKTTTPAPRPPTPAPTIASQPLSLRPEACRPAAGGAVHTRGLDFACDIYIWAPLAGTCGVLLLSLVITLYCKRGRKKLLYIFKQPFMRPVQTTQEEDGCSCRFPEEEEGGCELRVKFSRSADAPAYKQGQNQLYNELNLGRREEYDVLDKRRGRDPEMGGKPRRKNPQEGLYNELQKDKMAEAYSEIGMKGERRRGKGHDGLYQGLSTATKDTYDALHMQALPPR

SEQ ID NO: 1616 - DNA, 1470 bp, Artificial Sequence
  source: /note="Description of Artificial Sequence: Synthetic polynucleotide"
atggccctccctgtcaccgccctgctgcttccgctggctcttctgctccacgccgctcggcccgaagtccaactggtggagtccgggggagggctcgtgcagcccggaggcagccttcggctgtcgtgcgccgcctccgggttcacgttctcatcctacgcgatgtcgtgggtcagacaggcaccaggaaagggactggaatgggtgtccgccattagcggctccggcggtagcacctactatgccgactcagtgaagggaaggttcactatctcccgcgacaacagcaagaacaccctgtacctccaaatgaactctctgcgggccgaggataccgcggtgtactattgcgccaagatgggttggtccagcggatacttgggagccttcgacatttggggacagggcactactgtgaccgtgtcctccgggggtggcggatcgggaggcggcggctcgggtggagggggttccgaaatcgtgttgacccagtcaccgggaaccctctcgctgtccccgggagaacgggctacactgtcatgtagagcgtcccagtccgtggcttcctcgttcctggcctggtaccagcagaagccgggacaggcaccccgcctgctcatctacggagccagcggccgggcgaccggcatccctgaccgcttctccggttccggctcgggcaccgactttactctgaccattagcaggcttgagcccgaggattttgccgtgtactactgccaacactacggggggagccctcgcctgaccttcggaggcggaactaaggtcgatatcaaaaccactaccccagcaccgaggccacccaccccggctcctaccatcgcctcccagcctctgtccctgcgtccggaggcatgtagacccgcagctggtggggccgtgcatacccggggtcttgacttcgcctgcgatatctacatttgggcccctctggctggtacttgcggggtcctgctgctttcactcgtgatcactctttactgtaagcgcggtcggaagaagctgctgtacatctttaagcaacccttcatgaggcctgtgcagactactcaagaggaggacggctgttcatgccggttcccagaggaggaggaaggcggctgcgaactgcgcgtgaaattcagccgcagcgcagatgctccagcctacaagcaggggcagaaccagctctacaacgaactcaatcttggtcggagagaggagtacgacgtgctggacaagcggagaggacgggacccagaaatgggcgggaagccgcgcagaaagaatccccaagagggcctgtacaacgagctccaaaaggataagatggcagaagcctatagcgagattggtatgaaaggggaacgcagaagaggcaaaggccacgacggactgtaccagggactcagcaccgccaccaaggacacctatgacgctcttcacatgcaggccctgccgcctcgg

SEQ ID NO: 1617 - protein, 122 aa, Artificial Sequence
  source: /note="Description of Artificial Sequence: Synthetic polypeptide"
QIQLVQSGPDLKKPGETVKLSCKASGYTFTNFGMNWVKQAPGKGFKWMAWINTYTGESYFADDFKGRFAFSVETSATTAYLQINNLKTEDTATYFCARGEIYYGYDGGFAYWGQGTLVTVSA

SEQ ID NO: 1618 - protein, 107 aa, Artificial Sequence
  source: /note="Description of Artificial Sequence: Synthetic polypeptide"
DVVMTQSHRFMSTSVGDRVSITCRASQDVNTAVSWYQQKPGQSPKLLIFSASYRYTGVPDRFTGSGSGADFTLTISSVQAEDLAVYYCQQHYSTPWTFGGGTKLDIK

SEQ ID NO: 1619 - protein, 244 aa, Artificial Sequence
  source: /note="Description of Artificial Sequence: Synthetic polypeptide"
QIQLVQSGPDLKKPGETVKLSCKASGYTFTNFGMNWVKQAPGKGFKWMAWINTYTGESYFADDFKGRFAFSVETSATTAYLQINNLKTEDTATYFCARGEIYYGYDGGFAYWGQGTLVTVSAGGGGSGGGGSGGGGSDVVMTQSHRFMSTSVGDRVSITCRASQDVNTAVSWYQQKPGQSPKLLIFSASYRYTGVPDRFTGSGSGADFTLTISSVQAEDLAVYYCQQHYSTPWTFGGGTKLDIK

SEQ ID NO: 1620 - protein, 467 aa, Artificial Sequence
  source: /note="Description of Artificial Sequence: Synthetic polypeptide"
QIQLVQSGPDLKKPGETVKLSCKASGYTFTNFGMNWVKQAPGKGFKWMAWINTYTGESYFADDFKGRFAFSVETSATTAYLQINNLKTEDTATYFCARGEIYYGYDGGFAYWGQGTLVTVSAGGGGSGGGGSGGGGSDVVMTQSHRFMSTSVGDRVSITCRASQDVNTAVSWYQQKPGQSPKLLIFSASYRYTGVPDRFTGSGSGADFTLTISSVQAEDLAVYYCQQHYSTPWTFGGGTKLDIKTTTPAPRPPTPAPTIASQPLSLRPEACRPAAGGAVHTRGLDFACDIYIWAPLAGTCGVLLLSLVITLYCKRGRKKLLYIFKQPFMRPVQTTQEEDGCSCRFPEEEEGGCELRVKFSRSADAPAYKQGQNQLYNELNLGRREEYDVLDKRRGRDPEMGGKPRRKNPQEGLYNELQKDKMAEAYSEIGMKGERRRGKGHDGLYQGLSTATKDTYDALHMQALPPR

SEQ ID NO: 1621 - protein, 117 aa, Artificial Sequence
  source: /note="Description of Artificial Sequence: Synthetic polypeptide"
QIQLVQSGPELKKPGETVKISCKASGYTFTDYSINWVKRAPGKGLKWMGWINTETREPAYAYDFRGRFAFSLETSASTAYLQINNLKYEDTATYFCALDYSYAMDYWGQGTSVTVSS

SEQ ID NO: 1622 - protein, 111 aa, Artificial Sequence
  source: /note="Description of Artificial Sequence: Synthetic polypeptide"
DIVLTQSPASLAMSLGKRATISCRASESVSVIGAHLIHWYQQKPGQPPKLLIYLASNLETGVPARFSGSGSGTDFTLTIDPVEEDDVAIYSCLQSRIFPRTFGGGTKLEIK

SEQ ID NO: 1623 - protein, 249 aa, Artificial Sequence
  source: /note="Description of Artificial Sequence: Synthetic polypeptide"
QIQLVQSGPELKKPGETVKISCKASGYTFTDYSINWVKRAPGKGLKWMGWINTETREPAYAYDFRGRFAFSLETSASTAYLQINNLKYEDTATYFCALDYSYAMDYWGQGTSVTVSSGGGGSGGGGSGGGGSQIQLVQSGPELKKPGETVKISCKASGYTFTDYSINWVKRAPGKGLKWMGWINTETREPAYAYDFRGRFAFSLETSASTAYLQINNLKYEDTATYFCALDYSYAMDYWGQGTSVTVSS

SEQ ID NO: 1624 - protein, 472 aa, Artificial Sequence
  source: /note="Description of Artificial Sequence: Synthetic polypeptide"
QIQLVQSGPELKKPGETVKISCKASGYTFTDYSINWVKRAPGKGLKWMGWINTETREPAYAYDFRGRFAFSLETSASTAYLQINNLKYEDTATYFCALDYSYAMDYWGQGTSVTVSSGGGGSGGGGSGGGGSQIQLVQSGPELKKPGETVKISCKASGYTFTDYSINWVKRAPGKGLKWMGWINTETREPAYAYDFRGRFAFSLETSASTAYLQINNLKYEDTATYFCALDYSYAMDYWGQGTSVTVSSTTTPAPRPPTPAPTIASQPLSLRPEACRPAAGGAVHTRGLDFACDIYIWAPLAGTCGVLLLSLVITLYCKRGRKKLLYIFKQPFMRPVQTTQEEDGCSCRFPEEEEGGCELRVKFSRSADAPAYKQGQNQLYNELNLGRREEYDVLDKRRGRDPEMGGKPRRKNPQEGLYNELQKDKMAEAYSEIGMKGERRRGKGHDGLYQGLSTATKDTYDALHMQALPPR

SEQ ID NO: 1625 - protein, 117 aa, Artificial Sequence
  source: /note="Description of Artificial Sequence: Synthetic polypeptide"
QIQLVQSGPELKKPGETVKISCKASGYTFRHYSMNWVKQAPGKGLKWMGRINTESGVPIYADDFKGRFAFSVETSASTAYLVINNLKDEDTASYFCSNDYLYSLDFWGQGTALTVSS

SEQ ID NO: 1626 - protein, 111 aa, Artificial Sequence
  source: /note="Description of Artificial Sequence: Synthetic polypeptide"
DIVLTQSPPSLAMSLGKRATISCRASESVTILGSHLIYWYQQKPGQPPTLLIQLASNVQTGVPARFSGSGSRTDFTLTIDPVEEDDVAVYYCLQSRTIPRTFGGGTKLEIK

SEQ ID NO: 1627 - protein, 243 aa, Artificial Sequence
  source: /note="Description of Artificial Sequence: Synthetic polypeptide"
QIQLVQSGPELKKPGETVKISCKASGYTFRHYSMNWVKQAPGKGLKWMGRINTESGVPIYADDFKGRFAFSVETSASTAYLVINNLKDEDTASYFCSNDYLYSLDFWGQGTALTVSSGGGGSGGGGSGGGGSDIVLTQSPPSLAMSLGKRATISCRASESVTILGSHLIYWYQQKPGQPPTLLIQLASNVQTGVPARFSGSGSRTDFTLTIDPVEEDDVAVYYCLQSRTIPRTFGGGTKLEIK

SEQ ID NO: 1628 - protein, 466 aa, Artificial Sequence
  source: /note="Description of Artificial Sequence: Synthetic polypeptide"
QIQLVQSGPELKKPGETVKISCKASGYTFRHYSMNWVKQAPGKGLKWMGRINTESGVPIYADDFKGRFAFSVETSASTAYLVINNLKDEDTASYFCSNDYLYSLDFWGQGTALTVSSGGGGSGGGGSGGGGSDIVLTQSPPSLAMSLGKRATISCRASESVTILGSHLIYWYQQKPGQPPTLLIQLASNVQTGVPARFSGSGSRTDFTLTIDPVEEDDVAVYYCLQSRTIPRTFGGGTKLEIKTTTPAPRPPTPAPTIASQPLSLRPEACRPAAGGAVHTRGLDFACDIYIWAPLAGTCGVLLLSLVITLYCKRGRKKLLYIFKQPFMRPVQTTQEEDGCSCRFPEEEEGGCELRVKFSRSADAPAYKQGQNQLYNELNLGRREEYDVLDKRRGRDPEMGGKPRRKNPQEGLYNELQKDKMAEAYSEIGMKGERRRGKGHDGLYQGLSTATKDTYDALHMQALPPR

SEQ ID NO: 1629 - protein, 117 aa, Artificial Sequence
  source: /note="Description of Artificial Sequence: Synthetic polypeptide"
QIQLVQSGPELKKPGETVKISCKASGYTFTHYSMNWVKQAPGKGLKWMGRINTETGEPLYADDFKGRFAFSLETSASTAYLVINNLKNEDTATFFCSNDYLYSCDYWGQGTTLTVSS

SEQ ID NO: 1630 - protein, 111 aa, Artificial Sequence; identical to SEQ ID NO: 1626
  source: /note="Description of Artificial Sequence: Synthetic polypeptide"

SEQ ID NO: 1631 - protein, 243 aa, Artificial Sequence
  source: /note="Description of Artificial Sequence: Synthetic polypeptide"
QIQLVQSGPELKKPGETVKISCKASGYTFTHYSMNWVKQAPGKGLKWMGRINTETGEPLYADDFKGRFAFSLETSASTAYLVINNLKNEDTATFFCSNDYLYSCDYWGQGTTLTVSSGGGGSGGGGSGGGGSDIVLTQSPPSLAMSLGKRATISCRASESVTILGSHLIYWYQQKPGQPPTLLIQLASNVQTGVPARFSGSGSRTDFTLTIDPVEEDDVAVYYCLQSRTIPRTFGGGTKLEIK

SEQ ID NO: 1632 - protein, 466 aa, Artificial Sequence
  source: /note="Description of Artificial Sequence: Synthetic polypeptide"
QIQLVQSGPELKKPGETVKISCKASGYTFTHYSMNWVKQAPGKGLKWMGRINTETGEPLYADDFKGRFAFSLETSASTAYLVINNLKNEDTATFFCSNDYLYSCDYWGQGTTLTVSSGGGGSGGGGSGGGGSDIVLTQSPPSLAMSLGKRATISCRASESVTILGSHLIYWYQQKPGQPPTLLIQLASNVQTGVPARFSGSGSRTDFTLTIDPVEEDDVAVYYCLQSRTIPRTFGGGTKLEIKTTTPAPRPPTPAPTIASQPLSLRPEACRPAAGGAVHTRGLDFACDIYIWAPLAGTCGVLLLSLVITLYCKRGRKKLLYIFKQPFMRPVQTTQEEDGCSCRFPEEEEGGCELRVKFSRSADAPAYKQGQNQLYNELNLGRREEYDVLDKRRGRDPEMGGKPRRKNPQEGLYNELQKDKMAEAYSEIGMKGERRRGKGHDGLYQGLSTATKDTYDALHMQALPPR

SEQ ID NO: 1633 - protein, 465 aa, Artificial Sequence
  source: /note="Description of Artificial Sequence: Synthetic polypeptide"
DIQMTQTTSSLSASLGDRVTISCRASQDISKYLNWYQQKPDGTVKLLIYHTSRLHSGVPSRFSGSGSGTDYSLTISNLEQEDIATYFCQQGNTLPYTFGGGTKLEITGGGGSGGGGSGGGGSEVKLQESGPGLVAPSQSLSVTCTVSGVSLPDYGVSWIRQPPRKGLEWLGVIWGSETTYYNSALKSRLTIIKDNSKSQVFLKMNSLQTDDTAIYYCAKHYYYGGSYAMDYWGQGTSVTVSSTTTPAPRPPTPAPTIASQPLSLRPEACRPAAGGAVHTRGLDFACDIYIWAPLAGTCGVLLLSLVITLYCKRGRKKLLYIFKQPFMRPVQTTQEEDGCSCRFPEEEEGGCELRVKFSRSADAPAYKQGQNQLYNELNLGRREEYDVLDKRRGRDPEMGGKPRRKNPQEGLYNELQKDKMAEAYSEIGMKGERRRGKGHDGLYQGLSTATKDTYDALHMQALPPR

SEQ ID NO: 1634 - protein, 5 aa, Artificial Sequence
  source: /note="Description of Artificial Sequence: Synthetic peptide"
DYGVS

SEQ ID NO: 1635 - protein, 121 aa, Artificial Sequence
  source: /note="Description of Artificial Sequence: Synthetic polypeptide"
QVQLVQSGAEVKKPGSSVKVSCKASGGTFSNYWMHWVRQAPGQGLEWMGATYRGHSDTYYNQKFKGRVTITADKSTSTAYMELSSLRSEDTAVYYCARGAIYDGYDVLDNWGQGTLVTVSS

SEQ ID NO: 1636 - protein, 108 aa, Artificial Sequence
  source: /note="Description of Artificial Sequence: Synthetic polypeptide"
DIQMTQSPSSLSASVGDRVTITCSASQDISNYLNWYQQKPGKAPKLLIYYTSNLHSGVPSRFSGSGSGTDFTLTISSLQPEDFATYYCQQYRKLPWTFGQGTKLEIKR

SEQ ID NO: 1637 - protein, 451 aa, Artificial Sequence
  source: /note="Description of Artificial Sequence: Synthetic polypeptide"
  VARIANT (451)..(451): /replace=" "
  MISC_FEATURE (1)..(451): /note="Variant residues given in the sequence have no preference with respect to those in the annotations for variant positions"
QVQLVQSGAEVKKPGSSVKVSCKASGGTFSNYWMHWVRQAPGQGLEWMGATYRGHSDTYYNQKFKGRVTITADKSTSTAYMELSSLRSEDTAVYYCARGAIYNGYDVLDNWGQGTLVTVSSASTKGPSVFPLAPSSKSTSGGTAALGCLVKDYFPEPVTVSWNSGALTSGVHTFPAVLQSSGLYSLSSVVTVPSSSLGTQTYICNVNHKPSNTKVDKRVEPKSCDKTHTCPPCPAPELLGGPSVFLFPPKPKDTLMISRTPEVTCVVVAVSHEDPEVKFNWYVDGVEVHNAKTKPREEQYNSTYRVVSVLTVLHQDWLNGKEYKCKVSNKALAAPIEKTISKAKGQPREPQVCTLPPSREEMTKNQVSLSCAVKGFYPSDIAVEWESNGQPENNYKTTPPVLDSDGSFFLVSKLTVDKSRWQQGNVFSCSVMHEALHNHYTQKSLSLSPGK

SEQ ID NO: 1638 - protein, 214 aa, Artificial Sequence
  source: /note="Description of Artificial Sequence: Synthetic polypeptide"
DIQMTQSPSSLSASVGDRVTITCSASQDISNYLNWYQQKPGKAPKLLIYYTSNLHSGVPSRFSGSGSGTDFTLTISSLQPEDFATYYCQQYRKLPWTFGQGTKLEIKRTVAAPSVFIFPPSDEQLKSGTASVVCLLNNFYPREAKVQWKVDNALQSGNSQESVTEQDSKDSTYSLSSTLTLSKADYEKHKVYACEVTHQGLSSPVTKSFNRGEC

SEQ ID NO: 1639 - protein, 119 aa, Artificial Sequence
  source: /note="Description of Artificial Sequence: Synthetic polypeptide"
EVQLLESGGGLVQPGGSLRLSCAASGFTFSSYAMSWVRQAPGKGLEWVSAISGSGGSTYYADSVKGRFTISRDNSKNTLYLQMNSLRAEDTAVYYCAKVAPYFAPFDYWGQGTLVTVSS

SEQ ID NO: 1640 - protein, 109 aa, Artificial Sequence
  source: /note="Description of Artificial Sequence: Synthetic polypeptide"
EIVLTQSPGTLSLSPGERATLSCRASQSVSSSYLAWYQQKPGQAPRLLIYGASSRATGIPDRFSGSGSGTDFTLTISRLEPEDFAVYYCQQYGNPPLYTFGQGTKVEIK

SEQ ID NO: 1641 - protein, 449 aa, Artificial Sequence
  source: /note="Description of Artificial Sequence: Synthetic polypeptide"
  VARIANT (449)..(449): /replace=" "
  MISC_FEATURE (1)..(449): /note="Variant residues given in the sequence have no preference with respect to those in the annotations for variant positions"
EVQLLESGGGLVQPGGSLRLSCAASGFTFSSYAMSWVRQAPGKGLEWVSAISGSGGSTYYADSVKGRFTISRDNSKNTLYLQMNSLRAEDTAVYYCAKVAPYFAPFDYWGQGTLVTVSSASTKGPSVFPLAPSSKSTSGGTAALGCLVKDYFPEPVTVSWNSGALTSGVHTFPAVLQSSGLYSLSSVVTVPSSSLGTQTYICNVNHKPSNTKVDKRVEPKSCDKTHTCPPCPAPELLGGPSVFLFPPKPKDTLMISRTPEVTCVVVDVSHEDPEVKFNWYVDGVEVHNAKTKPREEQYASTYRVVSVLTVLHQDWLNGKEYKCKVSNKALPAPIEKTISKAKGQPREPQVCTLPPSREEMTKNQVSLSCAVKGFYPSDIAVEWESNGQPENNYKTTPPVLDSDGSFFLVSKLTVDKSRWQQGNVFSCSVMHEALHNHYTQKSLSLSPGK

SEQ ID NO: 1642 - protein, 216 aa, Artificial Sequence
  source: /note="Description of Artificial Sequence: Synthetic polypeptide"
EIVLTQSPGTLSLSPGERATLSCRASQSVSSSYLAWYQQKPGQAPRLLIYGASSRATGIPDRFSGSGSGTDFTLTISRLEPEDFAVYYCQQYGNPPLYTFGQGTKVEIKRTVAAPSVFIFPPSDEQLKSGTASVVCLLNNFYPREAKVQWKVDNALQSGNSQESVTEQDSKDSTYSLSSTLTLSKADYEKHKVYACEVTHQGLSSPVTKSFNRGEC

SEQ ID NO: 1643 - protein, 117 aa, Artificial Sequence; identical to SEQ ID NO: 1621
  source: /note="Description of Artificial Sequence: Synthetic polypeptide"

SEQ ID NO: 1644 - protein, 111 aa, Artificial Sequence
  source: /note="Description of Artificial Sequence: Synthetic polypeptide"
DIVLTQSPPSLAMSLGKRATISCRASESVTILGSHLIHWYQQKPGQPPTLLIQLASNVQTGVPARFSGSGSRTDFTLTIDPVEEDDVAVYYCLQSRTIPRTFGGGTKLEIK

SEQ ID NO: 1645 - protein, 447 aa, Artificial Sequence
  source: /note="Description of Artificial Sequence: Synthetic polypeptide"
  VARIANT (447)..(447): /replace=" "
  MISC_FEATURE (1)..(447): /note="Variant residues given in the sequence have no preference with respect to those in the annotations for variant positions"
QIQLVQSGPELKKPGETVKISCKASGYTFTDYSINWVKRAPGKGLKWMGWINTETREPAYAYDFRGRFAFSLETSASTAYLQINNLKYEDTATYFCALDYSYAMDYWGQGTSVTVSSASTKGPSVFPLAPSSKSTSGGTAALGCLVKDYFPEPVTVSWNSGALTSGVHTFPAVLQSSGLYSLSSVVTVPSSSLGTQTYICNVNHKPSNTKVDKRVEPKSCDKTHTCPPCPAPELLGGPSVFLFPPKPKDTLMISRTPEVTCVVVDVSHEDPEVKFNWYVDGVEVHNAKTKPREEQYASTYRVVSVLTVLHQDWLNGKEYKCKVSNKALPAPIEKTISKAKGQPREPQVCTLPPSREEMTKNQVSLSCAVKGFYPSDIAVEWESNGQPENNYKTTPPVLDSDGSFFLVSKLTVDKSRWQQGNVFSCSVMHEALHNHYTQKSLSLSPGK

SEQ ID NO: 1646 - protein, 218 aa, Artificial Sequence
  source: /note="Description of Artificial Sequence: Synthetic polypeptide"
DIVLTQSPASLAMSLGKRATISCRASESVSVIGAHLIHWYQQKPGQPPKLLIYLASNLETGVPARFSGSGSGTDFTLTIDPVEEDDVAIYSCLQSRIFPRTFGGGTKLEIKRTVAAPSVFIFPPSDEQLKSGTASVVCLLNNFYPREAKVQWKVDNALQSGNSQESVTEQDSKDSTYSLSSTLTLSKADYEKHKVYACEVTHQGLSSPVTKSFNRGEC

SEQ ID NO: 1647 - protein, 116 aa, Artificial Sequence
  source: /note="Description of Artificial Sequence: Synthetic polypeptide"
EVQLLESGGGLVQPGGSLRLSCAASGFTFSSYAMSWVRQAPGKGLEWVSAISGSGGSTYYADSVKGRFTISRDNSKNTLYLQMNSLRAEDTAVYYCAKVLGWFDYWGQGTLVTVSS

SEQ ID NO: 1648 - protein, 109 aa, Artificial Sequence
  source: /note="Description of Artificial Sequence: Synthetic polypeptide"
EIVLTQSPGTLSLSPGERATLSCRASQSVSSSYLAWYQQKPGQAPRLLIYGASSRATGIPDRFSGSGSGTDFTLTISRLEPEDFAVYYCQQYGYPPDFTFGQGTKVEIK

SEQ ID NO: 1649 - protein, 477 aa, Artificial Sequence
  source: /note="Description of Artificial Sequence: Synthetic polypeptide"
  VARIANT (477)..(477): /replace=" "
  MISC_FEATURE (1)..(477): /note="Variant residues given in the sequence have no preference with respect to those in the annotations for variant positions"
EVQLLESGGGLVQPGGSLRLSCAASGFTFSSYAMSWVRQAPGKGLEWVSAISGSGGSTYYADSVKGRFTISRDNSKNTLYLQMNSLRAEDTAVYYCAKVLGWFDYWGQGTLVTVSSGGGGSGGGGSGGGGSGGGGSEIVLTQSPGTLSLSPGERATLSCRASQSVSSSYLAWYQQKPGQAPRLLIYGASSRATGIPDRFSGSGSGTDFTLTISRLEPEDFAVYYCQQYGYPPDFTFGQGTKVEIKGGGGSDKTHTCPPCPAPELLGGPSVFLFPPKPKDTLMISRTPEVTCVVVAVSHEDPEVKFNWYVDGVEVHNAKTKPREEQYNSTYRVVSVLTVLHQDWLNGKEYKCKVSNKALAAPIEKTISKAKGQPREPQVYTLPPCRDELTKNQVSLWCLVKGFYPSDIAVEWESNGQPENNYKTTPPVLDSDGSFFLYSKLTVDKSRWQQGNVFSCSVMHEALHNHYTQKSLSLSPGK

SEQ ID NO: 1650 - protein, 215 aa, Artificial Sequence
  source: /note="Description of Artificial Sequence: Synthetic polypeptide"
QAVVTQEPSLTVSPGGTVTLTCGSSTGAVTTSNYANWVQEKPGQAFRGLIGGTNKRAPGTPARFSGSLLGGKAALTLSGAQPEDEAEYYCALWYSNLWVFGGGTKLTVLGQPKAAPSVTLFPPSSEELQANKATLVCLISDFYPGAVTVAWKADSSPVKAGVETTTPSKQSNNKYAASSYLSLTPEQWKSHRSYSCQVTHEGSTVEKTVAPTECS

SEQ ID NO: 1651 - protein, 449 aa, Artificial Sequence
  source: /note="Description of Artificial Sequence: Synthetic polypeptide"
  VARIANT (449)..(449): /replace=" "
  MISC_FEATURE (1)..(449): /note="Variant residues given in the sequence have no preference with respect to those in the annotations for variant positions"
EVQLVESGGGLVKPGGSLRLSCAASGFTFSNSGMIWVRQAPGKGLEWVGHIRSKTDGGTTDYAAPVKGRFTISRDDSKNTLYLQMNSLKTEDTAVYYCTTGGSGSFDYWGQGTLVTVSSASTKGPSVFPLAPSSKSTSGGTAALGCLVKDYFPEPVTVSWNSGALTSGVHTFPAVLQSSGLYSLSSVVTVPSSSLGTQTYICNVNHKPSNTKVDKRVEPKSCDKTHTCPPCPAPEAAGGPSVFLFPPKPKDTLMISRTPEVTCVVVDVSHEDPEVKFNWYVDGVEVHNAKTKPREEQYNSTYRVVSVLTVLHQDWLNGKEYKCKVSNKALPAPIEKTISKAKGQPREPQVCTLPPSREEMTKNQVSLSCAVKGFYPSDIAVEWESNGQPENNYKTTPPVLDSDGSFFLVSKLTVDKSRWQQGNVFSCSVMHEALHNHYTQKSLSLSPGK

SEQ ID NO: 1652 - protein, 5 aa, Artificial Sequence
  source: /note="Description of Artificial Sequence: Synthetic peptide"
NHGMS

SEQ ID NO: 1653 - protein, 5 aa, Artificial Sequence
  source: /note="Description of Artificial Sequence: Synthetic peptide"
NYAMS

SEQ ID NO: 1654 - protein, 5 aa, Artificial Sequence
  source: /note="Description of Artificial Sequence: Synthetic peptide"
DYAMH

SEQ ID NO: 1655 - protein, 5 aa, Artificial Sequence
  source: /note="Description of Artificial Sequence: Synthetic peptide"
NHGMS

SEQ ID NO: 1656 - protein, 5 aa, Artificial Sequence
  source: /note="Description of Artificial Sequence: Synthetic peptide"
NFGIN

SEQ ID NO: 1657 - protein, 5 aa, Artificial Sequence
  source: /note="Description of Artificial Sequence: Synthetic peptide"
SDAMT

SEQ ID NO: 1658 - protein, 5 aa, Artificial Sequence
  source: /note="Description of Artificial Sequence: Synthetic peptide"
NYGIT

SEQ ID NO: 1659 - protein, 5 aa, Artificial Sequence
  source: /note="Description of Artificial Sequence: Synthetic peptide"
NHGMS

SEQ ID NO: 1660-1669 - skipped (10 entries)

SEQ ID NO: 1670 - protein, 5 aa, Artificial Sequence
  source: /note="Description of Artificial Sequence: Synthetic peptide"
NHGMS

SEQ ID NO: 1671 - protein, 5 aa, Artificial Sequence
  source: /note="Description of Artificial Sequence: Synthetic peptide"
NHGMS

SEQ ID NO: 1672 - protein, 5 aa, Artificial Sequence
  source: /note="Description of Artificial Sequence: Synthetic peptide"
DYYMS

SEQ ID NO: 1673 - protein, 5 aa, Artificial Sequence
  source: /note="Description of Artificial Sequence: Synthetic peptide"
NHGMS

SEQ ID NO: 1674 - protein, 5 aa, Artificial Sequence
  source: /note="Description of Artificial Sequence: Synthetic peptide"
NHGMS

SEQ ID NO: 1675 - protein, 5 aa, Artificial Sequence
  source: /note="Description of Artificial Sequence: Synthetic peptide"
NHGMS

SEQ ID NO: 1676 - protein, 7 aa, Artificial Sequence
  source: /note="Description of Artificial Sequence: Synthetic peptide"
SSYYYWG

SEQ ID NO: 1677 - protein, 7 aa, Artificial Sequence
  source: /note="Description of Artificial Sequence: Synthetic peptide"
TSGMCVS

SEQ ID NO: 1678 - protein, 5 aa, Artificial Sequence
  source: /note="Description of Artificial Sequence: Synthetic peptide"
SYSMN

SEQ ID NO: 1679 - protein, 5 aa, Artificial Sequence
  source: /note="Description of Artificial Sequence: Synthetic peptide"
DYYMS

SEQ ID NO: 1680 - protein, 5 aa, Artificial Sequence
  source: /note="Description of Artificial Sequence: Synthetic peptide"
SHYIH

SEQ ID NO: 1681 - protein, 7 aa, Artificial Sequence
  source: /note="Description of Artificial Sequence: Synthetic peptide"
SGGYYWS

SEQ ID NO: 1682 - protein, 5 aa, Artificial Sequence
  source: /note="Description of Artificial Sequence: Synthetic peptide"
SYAIS

SEQ ID NO: 1683 - protein, 7 aa, Artificial Sequence
  source: /note="Description of Artificial Sequence: Synthetic peptide"
SNSAAWN

SEQ ID NO: 1684 - protein, 5 aa, Artificial Sequence
  source: /note="Description of Artificial Sequence: Synthetic peptide"
SYAMS

SEQ ID NO: 1685 - protein, 5 aa, Artificial Sequence
  source: /note="Description of Artificial Sequence: Synthetic peptide"
RYPMS

SEQ ID NO: 1686 - protein, 5 aa, Artificial Sequence
  source: /note="Description of Artificial Sequence: Synthetic peptide"
SYAMS

SEQ ID NO: 1687 - protein, 5 aa, Artificial Sequence
  source: /note="Description of Artificial Sequence: Synthetic peptide"
SYAMS

SEQ ID NO: 1688 - protein, 5 aa, Artificial Sequence
  source: /note="Description of Artificial Sequence: Synthetic peptide"
DYAMH

SEQ ID NO: 1689 - protein, 5 aa, Artificial Sequence
  source: /note="Description of Artificial Sequence: Synthetic peptide"
DYAMH

SEQ ID NO: 1690 - protein, 5 aa, Artificial Sequence
  source: /note="Description of Artificial Sequence: Synthetic peptide"
SYAMS

SEQ ID NO: 1691 - protein, 5 aa, Artificial Sequence
  source: /note="Description of Artificial Sequence: Synthetic peptide"
SYAMS

SEQ ID NO: 1692 - protein, 5 aa, Artificial Sequence
  source: /note="Description of Artificial Sequence: Synthetic peptide"
SYAMS

SEQ ID NO: 1693 - protein, 5 aa, Artificial Sequence
  source: /note="Description of Artificial Sequence: Synthetic peptide"
SYAMS

SEQ ID NO: 1694 - protein, 5 aa, Artificial Sequence
  source: /note="Description of Artificial Sequence: Synthetic peptide"
SYAMS

SEQ ID NO: 1695 - protein, 5 aa, Artificial Sequence
  source: /note="Description of Artificial Sequence: Synthetic peptide"
SYAMS

SEQ ID NO: 1696 - protein, 5 aa, Artificial Sequence
  source: /note="Description of Artificial Sequence: Synthetic peptide"
SYAMS

SEQ ID NO: 1697 - protein, 5 aa, Artificial Sequence
  source: /note="Description of Artificial Sequence: Synthetic peptide"
NFGMN

SEQ ID NO: 1698 - protein, 5 aa, Artificial Sequence
  source: /note="Description of Artificial Sequence: Synthetic peptide"
DYSIN

SEQ ID NO: 1699 - protein, 5 aa, Artificial Sequence
  source: /note="Description of Artificial Sequence: Synthetic peptide"
HYSMN

SEQ ID NO: 1700 - protein, 5 aa, Artificial Sequence
  source: /note="Description of Artificial Sequence: Synthetic peptide"
HYSMN

SEQ ID NO: 1701 - protein, 16 aa, Artificial Sequence
  source: /note="Description of Artificial Sequence: Synthetic peptide"
GIVYSGSTYYAASVKG

SEQ ID NO: 1702 - protein, 17 aa, Artificial Sequence
  source: /note="Description of Artificial Sequence: Synthetic peptide"
GISRSGENTYYADSVKG

SEQ ID NO: 1703 - protein, 17 aa, Artificial Sequence
  source: /note="Description of Artificial Sequence: Synthetic peptide"
GISWNSGSIGYADSVKG

SEQ ID NO: 1704 - protein, 16 aa, Artificial Sequence
  source: /note="Description of Artificial Sequence: Synthetic peptide"
GIVYSGSTYYAASVKG

SEQ ID NO: 1705 - protein, 17 aa, Artificial Sequence
  source: /note="Description of Artificial Sequence: Synthetic peptide"
WINPKNNNTNYAQKFQG

SEQ ID NO: 1706 - protein, 17 aa, Artificial Sequence
  source: /note="Description of Artificial Sequence: Synthetic peptide"
VISGSGGTTYYADSVKG

SEQ ID NO: 1707 - protein, 17 aa, Artificial Sequence
  source: /note="Description of Artificial Sequence: Synthetic peptide"
WISAYNGNTNYAQKFQG

SEQ ID NO: 1708 - protein, 16 aa, Artificial Sequence
  source: /note="Description of Artificial Sequence: Synthetic peptide"
GIVYSGSTYYAASVKG

SEQ ID NO: 1709 - protein, 16 aa, Artificial Sequence
  source: /note="Description of Artificial Sequence: Synthetic peptide"
GIVYSGSTYYAASVKG

SEQ ID NO: 1710 - protein, 16 aa, Artificial Sequence
  source: /note="Description of Artificial Sequence: Synthetic peptide"
GIVYSGSTYYAASVKG

SEQ ID NO: 1711 - protein, 17 aa, Artificial Sequence
  source: /note="Description of Artificial Sequence: Synthetic peptide"
YISSSGSTIYYADSVKG

SEQ ID NO: 1712 - protein, 17 aa, Artificial Sequence
  source: /note="Description of Artificial Sequence: Synthetic peptide"
YISSSGNTIYYADSVKG

SEQ ID NO: 1713 - protein, 16 aa, Artificial Sequence
  source: /note="Description of Artificial Sequence: Synthetic peptide"
GIVYSGSTYYAASVKG

SEQ ID NO: 1714 - protein, 16 aa, Artificial Sequence
  source: /note="Description of Artificial Sequence: Synthetic peptide"
GIVYSGSTYYAASVKG

SEQ ID NO: 1715 - protein, 16 aa, Artificial Sequence
  source: /note="Description of Artificial Sequence: Synthetic peptide"
GIVYSGSTYYAASVKG

SEQ ID NO: 1716 - protein, 16 aa, Artificial Sequence
  source: /note="Description of Artificial Sequence: Synthetic peptide"
SIYYSGSAYYNPSLKS

SEQ ID NO: 1717 - protein, 16 aa, Artificial Sequence
  source: /note="Description of Artificial Sequence: Synthetic peptide"
RIDWDEDKFYSTSLKT

SEQ ID NO: 1718 - protein, 17 aa, Artificial Sequence
  source: /note="Description of Artificial Sequence: Synthetic peptide"
SISSSSSYIYYADSVKG

SEQ ID NO: 1719 - protein, 17 aa, Artificial Sequence
  source: /note="Description of Artificial Sequence: Synthetic peptide"
YISSSGSTIYYADSVKG

SEQ ID NO: 1720 - protein, 17 aa, Artificial Sequence
  source: /note="Description of Artificial Sequence: Synthetic peptide"
MINPSGGVTAYSQTLQG

SEQ ID NO: 1721 - protein, 16 aa, Artificial Sequence
  source: /note="Description of Artificial Sequence: Synthetic peptide"
YIYYSGSTYYNPSLKS

SEQ ID NO: 1722 - protein, 17 aa, Artificial Sequence
  source: /note="Description of Artificial Sequence: Synthetic peptide"
GIIPIFGTANYAQKFQG

SEQ ID NO: 1723 - protein, 18 aa, Artificial Sequence
  source: /note="Description of Artificial Sequence: Synthetic peptide"
RTYYRSKWYSFYAISLKS

SEQ ID NO: 1724 - protein, 17 aa, Artificial Sequence
  source: /note="Description of Artificial Sequence: Synthetic peptide"
AISGSGGSTYYADSVKG

SEQ ID NO: 1725 - protein, 17 aa, Artificial Sequence
  source: /note="Description of Artificial Sequence: Synthetic peptide"
GISDSGVSTYYADSAKG

SEQ ID NO: 1726 - protein, 17 aa, Artificial Sequence
  source: /note="Description of Artificial Sequence: Synthetic peptide"
AISGSGGSTYYADSVKG

SEQ ID NO: 1727 - protein, 17 aa, Artificial Sequence
  source: /note="Description of Artificial Sequence: Synthetic peptide"
AISGSGGSTYYADSVKG

SEQ ID NO: 1728 - protein, 17 aa, Artificial Sequence
  source: /note="Description of Artificial Sequence: Synthetic peptide"
GISWNSGSIGYADSVKG

SEQ ID NO: 1729 - protein, 17 aa, Artificial Sequence
  source: /note="Description of Artificial Sequence: Synthetic peptide"
SINWKGNSLAYGDSVKG

SEQ ID NO: 1730 - protein, 17 aa, Artificial Sequence
  source: /note="Description of Artificial Sequence: Synthetic peptide"
AISGSGGSTYYADSVKG

SEQ ID NO: 1731 - protein, 17 aa, Artificial Sequence
  source: /note="Description of Artificial Sequence: Synthetic peptide"
AISGSGGSTYYADSVKG

SEQ ID NO: 1732 - protein, 17 aa, Artificial Sequence
  source: /note="Description of Artificial Sequence: Synthetic peptide"
AISGSGGSTYYADSVKG

SEQ ID NO: 1733 - protein, 17 aa, Artificial Sequence
  source: /note="Description of Artificial Sequence: Synthetic peptide"
AISGSGGSTYYADSVKG

SEQ ID NO: 1734 - protein, 17 aa, Artificial Sequence
  source: /note="Description of Artificial Sequence: Synthetic peptide"
AISGSGGSTYYADSVKG

SEQ ID NO: 1735 - protein, 17 aa, Artificial Sequence
  source: /note="Description of Artificial Sequence: Synthetic peptide"
AISGSGGSTYYADSVKG

SEQ ID NO: 1736 - protein, 17 aa, Artificial Sequence
  source: /note="Description of Artificial Sequence: Synthetic peptide"
AISGSGGSTYYADSVKG

SEQ ID NO: 1737 - protein, 17 aa, Artificial Sequence
  source: /note="Description of Artificial Sequence: Synthetic peptide"
WINTYTGESYFADDFKG

SEQ ID NO: 1738 - protein, 17 aa, Artificial Sequence
  source: /note="Description of Artificial Sequence: Synthetic peptide"
WINTETREPAYAYDFRG

SEQ ID NO: 1739 - protein, 17 aa, Artificial Sequence
  source: /note="Description of Artificial Sequence: Synthetic peptide"
RINTESGVPIYADDFKG

SEQ ID NO: 1740 - protein, 17 aa, Artificial Sequence
  source: /note="Description of Artificial Sequence: Synthetic peptide"
RINTETGEPLYADDFKG

SEQ ID NO: 1741 - protein, 7 aa, Artificial Sequence
  source: /note="Description of Artificial Sequence: Synthetic peptide"
HGGESDV

SEQ ID NO: 1742 - protein, 11 aa, Artificial Sequence
  source: /note="Description of Artificial Sequence: Synthetic peptide"
SPAHYYGGMDV

SEQ ID NO: 1743 - protein, 6 aa, Artificial Sequence
  source: /note="Description of Artificial Sequence: Synthetic peptide"
HSFLAY

SEQ ID NO: 1744 - protein, 7 aa, Artificial Sequence
  source: /note="Description of Artificial Sequence: Synthetic peptide"
HGGESDV

SEQ ID NO: 1745 - protein, 11 aa, Artificial Sequence
  source: /note="Description of Artificial Sequence: Synthetic peptide"
GPYYYQSYMDV

SEQ ID NO: 1746 - protein, 14 aa, Artificial Sequence
  source: /note="Description of Artificial Sequence: Synthetic peptide"
LDSSGYYYARGPRY

SEQ ID NO: 1747 - protein, 9 aa, Artificial Sequence
  source: /note="Description of Artificial Sequence: Synthetic peptide"
GPYYYYMDV

SEQ ID NO: 1748 - protein, 7 aa, Artificial Sequence
  source: /note="Description of Artificial Sequence: Synthetic peptide"
HGGESDV

SEQ ID NO: 1749 - protein, 7 aa, Artificial Sequence
  source: /note="Description of Artificial Sequence: Synthetic peptide"
HGGESDV

SEQ ID NO: 1750 - protein, 7 aa, Artificial Sequence
  source: /note="Description of Artificial Sequence: Synthetic peptide"
HGGESDV

SEQ ID NO: 1751 - protein, 8 aa, Artificial Sequence
  source: /note="Description of Artificial Sequence: Synthetic peptide"
ESGDGMDV

SEQ ID NO: 1752 - protein, 8 aa, Artificial Sequence
  source: /note="Description of Artificial Sequence: Synthetic peptide"
STMVREDY

SEQ ID NO: 1753 - protein, 7 aa, Artificial Sequence
  source: /note="Description of Artificial Sequence: Synthetic peptide"
HGGESDV

SEQ ID NO: 1754 - protein, 7 aa, Artificial Sequence
  source: /note="Description of Artificial Sequence: Synthetic peptide"
HGGESDV

SEQ ID NO: 1755 - protein, 7 aa, Artificial Sequence
  source: /note="Description of Artificial Sequence: Synthetic peptide"
HGGESDV

SEQ ID NO: 1756 - protein, 11 aa, Artificial Sequence
  source: /note="Description of Artificial Sequence: Synthetic peptide"
HWQEWPDAFDI

SEQ ID NO: 1757 - protein, 13 aa, Artificial Sequence
  source: /note="Description of Artificial Sequence: Synthetic peptide"
SGAGGTSATAFDI

SEQ ID NO: 1758 - protein, 10 aa, Artificial Sequence
  source: /note="Description of Artificial Sequence: Synthetic peptide"
TIAAVYAFDI

SEQ ID NO: 1759 - protein, 8 aa, Artificial Sequence
  source: /note="Description of Artificial Sequence: Synthetic peptide"
DLRGAFDI

SEQ ID NO: 1760 - protein, 11 aa, Artificial Sequence
  source: /note="Description of Artificial Sequence: Synthetic peptide"
EGSGSGWYFDF

SEQ ID NO: 1761 - protein, 13 aa, Artificial Sequence
  source: /note="Description of Artificial Sequence: Synthetic peptide"
AGIAARLRGAFDI

SEQ ID NO: 1762 - protein, 20 aa, Artificial Sequence
  source: /note="Description of Artificial Sequence: Synthetic peptide"
RGGYQLLRWDVGLLRSAFDI

SEQ ID NO: 1763 - protein, 13 aa, Artificial Sequence
  source: /note="Description of Artificial Sequence: Synthetic peptide"
SSPEGLFLYWFDP

SEQ ID NO: 1764 - protein, 9 aa, Artificial Sequence
  source: /note="Description of Artificial Sequence: Synthetic peptide"
VEGSGSLDY

SEQ ID NO: 1765 - protein, 9 aa, Artificial Sequence
  source: /note="Description of Artificial Sequence: Synthetic peptide"
RAGSEASDI

SEQ ID NO: 1766 - protein, 15 aa, Artificial Sequence
  source: /note="Description of Artificial Sequence: Synthetic peptide"
ATYKRELRYYYGMDV

SEQ ID NO: 1767 - protein, 15 aa, Artificial Sequence
  source: /note="Description of Artificial Sequence: Synthetic peptide"
ATYKRELRYYYGMDV

SEQ ID NO: 1768 - protein, 8 aa, Artificial Sequence
  source: /note="Description of Artificial Sequence: Synthetic peptide"
VGKAVPDV

SEQ ID NO: 1769 - protein, 13 aa, Artificial Sequence
  source: /note="Description of Artificial Sequence: Synthetic peptide"
HQGVAYYNYAMDV

SEQ ID NO: 1770 - protein, 8 aa, Artificial Sequence
  source: /note="Description of Artificial Sequence: Synthetic peptide"
VVRDGMDV

SEQ ID NO: 1771 - protein, 9 aa, Artificial Sequence
  source: /note="Description of Artificial Sequence: Synthetic peptide"
IPQTGTFDY

SEQ ID NO: 1772 - protein, 15 aa, Artificial Sequence
  source: /note="Description of Artificial Sequence: Synthetic peptide"
ANYKRELRYYYGMDV

SEQ ID NO: 1773 - protein, 11 aa, Artificial Sequence
  source: /note="Description of Artificial Sequence: Synthetic peptide"
ALVGATGAFDI

SEQ ID NO: 1774 - protein, 8 aa, Artificial Sequence
  source: /note="Description of Artificial Sequence: Synthetic peptide"
WFGEGFDP

SEQ ID NO: 1775 - protein, 17 aa, Artificial Sequence
  source: /note="Description of Artificial Sequence: Synthetic peptide"
VGYDSSGYYRDYYGMDV

SEQ ID NO: 1776 - protein, 13 aa, Artificial Sequence
  source: /note="Description of Artificial Sequence: Synthetic peptide"
MGWSSGYLGAFDI

SEQ ID NO: 1777 - protein, 13 aa, Artificial Sequence
  source: /note="Description of Artificial Sequence: Synthetic peptide"
GEIYYGYDGGFAY

SEQ ID NO: 1778 - protein, 8 aa, Artificial Sequence
  source: /note="Description of Artificial Sequence: Synthetic peptide"
DYSYAMDY

SEQ ID NO: 1779 - protein, 8 aa, Artificial Sequence
  source: /note="Description of Artificial Sequence: Synthetic peptide"
DYLYSLDF

SEQ ID NO: 1780-1799 - skipped (20 entries)

SEQ ID NO: 1800 - protein, 8 aa, Artificial Sequence
  source: /note="Description of Artificial Sequence: Synthetic peptide"
DYLYSCDY

SEQ ID NO: 1801-2503 - skipped (703 entries)

SEQ ID NO: 2504 - protein, 12 aa, Artificial Sequence
  source: /note="Description of Artificial Sequence: Synthetic peptide"
RASQSISSSFLA

SEQ ID NO: 2505 - protein, 16 aa, Artificial Sequence
  source: /note="Description of Artificial Sequence: Synthetic peptide"
RSSQSLLHSNGYNYLD

SEQ ID NO: 2506 - protein, 16 aa, Artificial Sequence
  source: /note="Description of Artificial Sequence: Synthetic peptide"
KSSQSLLRNDGKTPLY

SEQ ID NO: 2507 - protein, 16 aa, Artificial Sequence
  source: /note="Description of Artificial Sequence: Synthetic peptide"
RSSQSLLHSNGYNYLN

SEQ ID NO: 2508 - protein, 11 aa, Artificial Sequence
  source: /note="Description of Artificial Sequence: Synthetic peptide"
RASQSISSYLN

SEQ ID NO: 2509 - protein, 16 aa, Artificial Sequence
  source: /note="Description of Artificial Sequence: Synthetic peptide"
RSSQSLLYSNGYNYVD

SEQ ID NO: 2510 - protein, 11 aa, Artificial Sequence
  source: /note="Description of Artificial Sequence: Synthetic peptide"
RASQSVSSNLA

SEQ ID NO: 2511 - protein, 11 aa, Artificial Sequence
  source: /note="Description of Artificial Sequence: Synthetic peptide"
RASQSVSSKLA

SEQ ID NO: 2512 - protein, 12 aa, Artificial Sequence
  source: /note="Description of Artificial Sequence: Synthetic peptide"
RASQSVGSTNLA

SEQ ID NO: 2513 - protein, 11 aa, Artificial Sequence
  source: /note="Description of Artificial Sequence: Synthetic peptide"
RASQSISSYLN

SEQ ID NO: 2514 - protein, 11 aa, Artificial Sequence
  source: /note="Description of Artificial Sequence: Synthetic peptide"
RASQSISSYLN

SEQ ID NO: 2515 - protein, 16 aa, Artificial Sequence
  source: /note="Description of Artificial Sequence: Synthetic peptide"
KSSESLVHNSGKTYLN

SEQ ID NO: 2516 - protein, 11 aa, Artificial Sequence
  source: /note="Description of Artificial Sequence: Synthetic peptide"
QASEDINKFLN

SEQ ID NO: 2517 - protein, 11 aa, Artificial Sequence
  source: /note="Description of Artificial Sequence: Synthetic peptide"
RASQSVGSNLA

SEQ ID NO: 2518 - protein, 12 aa, Artificial Sequence
  source: /note="Description of Artificial Sequence: Synthetic peptide"
RASQSIGSSSLA

SEQ ID NO: 2519 - protein, 11 aa, Artificial Sequence
  source: /note="Description of Artificial Sequence: Synthetic peptide"
KASQDIDDAMN

SEQ ID NO: 2520 - protein, 11 aa, Artificial Sequence
  source: /note="Description of Artificial Sequence: Synthetic peptide"
RASQDIYNNLA

SEQ ID NO: 2521 - protein, 16 aa, Artificial Sequence
  source: /note="Description of Artificial Sequence: Synthetic peptide"
RSSQSLLHSNGYNYLD

SEQ ID NO: 2522 - protein, 11 aa, Artificial Sequence
  source: /note="Description of Artificial Sequence: Synthetic peptide"
GGNNIGTKSVH

SEQ ID NO: 2523 - protein, 11 aa, Artificial Sequence
  source: /note="Description of Artificial Sequence: Synthetic peptide"
SGDGLSKKYVS

SEQ ID NO: 2524 - protein, 11 aa, Artificial Sequence
  source: /note="Description of Artificial Sequence: Synthetic peptide"
RASQGIRNWLA

SEQ ID NO: 2525 - protein, 11 aa, Artificial Sequence
  source: /note="Description of Artificial Sequence: Synthetic peptide"
GGNNIGSKSVH

SEQ ID NO: 2526 - protein, 11 aa, Artificial Sequence
  source: /note="Description of Artificial Sequence: Synthetic peptide"
QGDSLGNYYAT

SEQ ID NO: 2527 - protein, 12 aa, Artificial Sequence
  source: /note="Description of Artificial Sequence: Synthetic peptide"
RASQSVSSAYLA

SEQ ID NO: 2528 - protein, 11 aa, Artificial Sequence
  source: /note="Description of Artificial Sequence: Synthetic peptide"
RASQSVSNSLA

SEQ ID NO: 2529 - protein, 12 aa, Artificial Sequence
  source: /note="Description of Artificial Sequence: Synthetic peptide"
RASQSVSSSFLA

SEQ ID NO: 2530 - protein, 12 aa, Artificial Sequence
  source: /note="Description of Artificial Sequence: Synthetic peptide"
RASQSVSTTFLA

SEQ ID NO: 2531 - protein, 11 aa, Artificial Sequence
  source: /note="Description of Artificial Sequence: Synthetic peptide"
RASQSISSYLN

SEQ ID NO: 2532 - protein, 12 aa, Artificial Sequence
  source: /note="Description of Artificial Sequence: Synthetic peptide"
RATQSIGSSFLA

SEQ ID NO: 2533 - protein, 12 aa, Artificial Sequence
  source: /note="Description of Artificial Sequence: Synthetic peptide"
RASQSVSSSYLA

SEQ ID NO: 2534 - protein, 12 aa, Artificial Sequence
  source: /note="Description of Artificial Sequence: Synthetic peptide"
RASQSVSSSYLA

SEQ ID NO: 2535 - protein, 12 aa, Artificial Sequence
  source: /note="Description of Artificial Sequence: Synthetic peptide"
RASQRVASNYLA

SEQ ID NO: 2536 - protein, 12 aa, Artificial Sequence
  source: /note="Description of Artificial Sequence: Synthetic peptide"
RASQSLSSNFLA

SEQ ID NO: 2537 - protein, 16 aa, Artificial Sequence
  source: /note="Description of Artificial Sequence: Synthetic peptide"
RSSQSLLHSNGYNYLD

SEQ ID NO: 2538 - protein, 12 aa, Artificial Sequence
  source: /note="Description of Artificial Sequence: Synthetic peptide"
RASQSVSSSYLA

SEQ ID NO: 2539 - protein, 12 aa, Artificial Sequence
  source: /note="Description of Artificial Sequence: Synthetic peptide"
RASQSVASSFLA

SEQ ID NO: 2540 - protein, 11 aa, Artificial Sequence
  source: /note="Description of Artificial Sequence: Synthetic peptide"
RASQDVNTAVS

SEQ ID NO: 2541 - protein, 15 aa, Artificial Sequence
  source: /note="Description of Artificial Sequence: Synthetic peptide"
RASESVSVIGAHLIH

SEQ ID NO: 2542 - protein, 15 aa, Artificial Sequence
  source: /note="Description of Artificial Sequence: Synthetic peptide"
RASESVTILGSHLIY

SEQ ID NO: 2543 - protein, 15 aa, Artificial Sequence
  source: /note="Description of Artificial Sequence: Synthetic peptide"
RASESVTILGSHLIY

SEQ ID NO: 2544 - protein, 7 aa, Artificial Sequence
  source: /note="Description of Artificial Sequence: Synthetic peptide"
GASRRAT

SEQ ID NO: 2545 - protein, 7 aa, Artificial Sequence
  source: /note="Description of Artificial Sequence: Synthetic peptide"
LGSNRAS

SEQ ID NO: 2546 - protein, 7 aa, Artificial Sequence
  source: /note="Description of Artificial Sequence: Synthetic peptide"
EVSNRFS

SEQ ID NO: 2547 - protein, 7 aa, Artificial Sequence
  source: /note="Description of Artificial Sequence: Synthetic peptide"
LGSKRAS

SEQ ID NO: 2548 - protein, 7 aa, Artificial Sequence
  source: /note="Description of Artificial Sequence: Synthetic peptide"
GASTLAS

SEQ ID NO: 2549 - protein, 7 aa, Artificial Sequence
  source: /note="Description of Artificial Sequence: Synthetic peptide"
LGSNRAS

SEQ ID NO: 2550 - protein, 7 aa, Artificial Sequence
  source: /note="Description of Artificial Sequence: Synthetic peptide"
GASTRAS

SEQ ID NO: 2551 - protein, 7 aa, Artificial Sequence
  source: /note="Description of Artificial Sequence: Synthetic peptide"
GASIRAT

SEQ ID NO: 2552 - protein, 7 aa, Artificial Sequence
  source: /note="Description of Artificial Sequence: Synthetic peptide"
DASNRAT

SEQ ID NO: 2553 - protein, 7 aa, Artificial Sequence
  source: /note="Description of Artificial Sequence: Synthetic peptide"
AASSLQS

SEQ ID NO: 2554 - protein, 7 aa, Artificial Sequence
  source: /note="Description of Artificial Sequence: Synthetic peptide"
AASSLQS

SEQ ID NO: 2555 - protein, 7 aa, Artificial Sequence
  source: /note="Description of Artificial Sequence: Synthetic peptide"
EVSNRDS

SEQ ID NO: 2556 - protein, 7 aa, Artificial Sequence
  source: /note="Description of Artificial Sequence: Synthetic peptide"
DASTLQT

SEQ ID NO: 2557 - protein, 7 aa, Artificial Sequence
  source: /note="Description of Artificial Sequence: Synthetic peptide"
GASTRAT

SEQ ID NO: 2558 - protein, 7 aa, Artificial Sequence
  source: /note="Description of Artificial Sequence: Synthetic peptide"
GASSRAS

SEQ ID NO: 2559 - protein, 7 aa, Artificial Sequence
  source: /note="Description of Artificial Sequence: Synthetic peptide"
SATSPVP

SEQ ID NO: 2560 - protein, 7 aa, Artificial Sequence
  source: /note="Description of Artificial Sequence: Synthetic peptide"
AANKSQS

SEQ ID NO: 2561 - protein, 7 aa, Artificial Sequence
  source: /note="Description of Artificial Sequence: Synthetic peptide"
LGSNRAS

SEQ ID NO: 2562 - protein, 7 aa, Artificial Sequence
  source: /note="Description of Artificial Sequence: Synthetic peptide"
DDSVRPS

SEQ ID NO: 2563 - protein, 7 aa, Artificial Sequence
  source: /note="Description of Artificial Sequence: Synthetic peptide"
RDKERPS

SEQ ID NO: 2564 - protein, 7 aa, Artificial Sequence
  source: /note="Description of Artificial Sequence: Synthetic peptide"
AASNLQS

SEQ ID NO: 2565 - protein, 7 aa, Artificial Sequence
  source: /note="Description of Artificial Sequence: Synthetic peptide"
GKNNRPS

SEQ ID NO: 2566 - protein, 7 aa, Artificial Sequence
  source: /note="Description of Artificial Sequence: Synthetic peptide"
GTNNRPS

SEQ ID NO: 2567 - protein, 7 aa, Artificial Sequence
  source: /note="Description of Artificial Sequence: Synthetic peptide"
GASTRAT

SEQ ID NO: 2568 - protein, 7 aa, Artificial Sequence
  source: /note="Description of Artificial Sequence: Synthetic peptide"
DASSRAT

SEQ ID NO: 2569 - protein, 7 aa, Artificial Sequence
  source: /note="Description of Artificial Sequence: Synthetic peptide"
GASSRAT

SEQ ID NO: 2570 - protein, 7 aa, Artificial Sequence
  source: /note="Description of Artificial Sequence: Synthetic peptide"
GSSNRAT

SEQ ID NO: 2571 - protein, 7 aa, Artificial Sequence
  source: /note="Description of Artificial Sequence: Synthetic peptide"
AASSLQS

SEQ ID NO: 2572 - protein, 7 aa, Artificial Sequence
  source: /note="Description of Artificial Sequence: Synthetic peptide"
GASQRAT

SEQ ID NO: 2573 - protein, 7 aa, Artificial Sequence
  source: /note="Description of Artificial Sequence: Synthetic peptide"
GASSRAT

SEQ ID NO: 2574 - protein, 7 aa, Artificial Sequence
  source: /note="Description of Artificial Sequence: Synthetic peptide"
GASSRAT

SEQ ID NO: 2575 - protein, 7 aa, Artificial Sequence
  source: /note="Description of Artificial Sequence: Synthetic peptide"
GASSRAT

SEQ ID NO: 2576 - protein, 7 aa, Artificial Sequence
  source: /note="Description of Artificial Sequence: Synthetic peptide"
GASNWAT

SEQ ID NO: 2577 - protein, 7 aa, Artificial Sequence
  source: /note="Description of Artificial Sequence: Synthetic peptide"
LGSNRAS

SEQ ID NO: 2578 - protein, 7 aa, Artificial Sequence
  source: /note="Description of Artificial Sequence: Synthetic peptide"
GTSSRAT

SEQ ID NO: 2579 - protein, 7 aa, Artificial Sequence
  source: /note="Description of Artificial Sequence: Synthetic peptide"
GASGRAT

SEQ ID NO: 2580 - protein, 7 aa, Artificial Sequence
  source: /note="Description of Artificial Sequence: Synthetic peptide"
SASYRYT

SEQ ID NO: 2581 - protein, 7 aa, Artificial Sequence
  source: /note="Description of Artificial Sequence: Synthetic peptide"
LASNLET

SEQ ID NO: 2582 - protein, 7 aa, Artificial Sequence
  source: /note="Description of Artificial Sequence: Synthetic peptide"
LASNVQT

SEQ ID NO: 2583 - protein, 7 aa, Artificial Sequence
  source: /note="Description of Artificial Sequence: Synthetic peptide"
LASNVQT

SEQ ID NO: 2584 - protein, 10 aa, Artificial Sequence
  source: /note="Description of Artificial Sequence: Synthetic peptide"
QQYHSSPSWT

SEQ ID NO: 2585 - protein, 9 aa, Artificial Sequence
  source: /note="Description of Artificial Sequence: Synthetic peptide"
MQALQTPYT

SEQ ID NO: 2586 - protein, 8 aa, Artificial Sequence
  source: /note="Description of Artificial Sequence: Synthetic peptide"
MQNIQFPS

SEQ ID NO: 2587 - protein, 9 aa, Artificial Sequence
  source: /note="Description of Artificial Sequence: Synthetic peptide"
MQALQTPYT

SEQ ID NO: 2588 - protein, 8 aa, Artificial Sequence
  source: /note="Description of Artificial Sequence: Synthetic peptide"
QQSYKRAS

SEQ ID NO: 2589 - protein, 9 aa, Artificial Sequence
  source: /note="Description of Artificial Sequence: Synthetic peptide"
MQGRQFPYS

SEQ ID NO: 2590 - protein, 8 aa, Artificial Sequence
  source: /note="Description of Artificial Sequence: Synthetic peptide"
QQYGSSLT

SEQ ID NO: 2591 - protein, 9 aa, Artificial Sequence
  source: /note="Description of Artificial Sequence: Synthetic peptide"
QQYGSSSWT

SEQ ID NO: 2592 - protein, 10 aa, Artificial Sequence
  source: /note="Description of Artificial Sequence: Synthetic peptide"
QQYGSSPPWT

SEQ ID NO: 2593 - protein, 7 aa, Artificial Sequence
  source: /note="Description of Artificial Sequence: Synthetic peptide"
QQSYTLA

SEQ ID NO: 2594 - protein, 9 aa, Artificial Sequence
  source: /note="Description of Artificial Sequence: Synthetic peptide"
QQSYSTPYT

SEQ ID NO: 2595 - protein, 9 aa, Artificial Sequence
  source: /note="Description of Artificial Sequence: Synthetic peptide"
MQGTHWPGT

SEQ ID NO: 2596 - protein, 9 aa, Artificial Sequence
  source: /note="Description of Artificial Sequence: Synthetic peptide"
QQYESLPLT

SEQ ID NO: 2597 - protein, 10 aa, Artificial Sequence
  source: /note="Description of Artificial Sequence: Synthetic peptide"
QQYNDWLPVT

SEQ ID NO: 2598 - protein, 10 aa, Artificial Sequence
  source: /note="Description of Artificial Sequence: Synthetic peptide"
QQYAGSPPFT

SEQ ID NO: 2599 - protein, 9 aa, Artificial Sequence
  source: /note="Description of Artificial Sequence: Synthetic peptide"
LQHDNFPLT

SEQ ID NO: 2600 - protein, 9 aa, Artificial Sequence
  source: /note="Description of Artificial Sequence: Synthetic peptide"
QHYYRFPYS

SEQ ID NO: 2601 - protein, 9 aa, Artificial Sequence
  source: /note="Description of Artificial Sequence: Synthetic peptide"
MQALQTPYT

SEQ ID NO: 2602 - protein, 11 aa, Artificial Sequence
  source: /note="Description of Artificial Sequence: Synthetic peptide"
QVWDSDSEHVV

SEQ ID NO: 2603 - protein, 9 aa, Artificial Sequence
  source: /note="Description of Artificial Sequence: Synthetic peptide"
QAWDDTTVV

SEQ ID NO: 2604 - protein, 9 aa, Artificial Sequence
  source: /note="Description of Artificial Sequence: Synthetic peptide"
QKYNSAPFT

SEQ ID NO: 2605 - protein, 12 aa, Artificial Sequence
  source: /note="Description of Artificial Sequence: Synthetic peptide"
SSRDSSGDHLRV

SEQ ID NO: 2606 - protein, 11 aa, Artificial Sequence
  source: /note="Description of Artificial Sequence: Synthetic peptide"
NSRDSSGHHLL

SEQ ID NO: 2607 - protein, 14 aa, Artificial Sequence
  source: /note="Description of Artificial Sequence: Synthetic peptide"
QHYGSSFNGSSLFT

SEQ ID NO: 2608 - protein, 10 aa, Artificial Sequence
  source: /note="Description of Artificial Sequence: Synthetic peptide"
QQFGTSSGLT

SEQ ID NO: 2609 - protein, 10 aa, Artificial Sequence
  source: /note="Description of Artificial Sequence: Synthetic peptide"
QQYHSSPSWT

SEQ ID NO: 2610 - protein, 10 aa, Artificial Sequence
  source: /note="Description of Artificial Sequence: Synthetic peptide"
QQYHSSPSWT

SEQ ID NO: 2611 - protein, 9 aa, Artificial Sequence
  source: /note="Description of Artificial Sequence: Synthetic peptide"
QQSYSTPYS

SEQ ID NO: 2612 - protein, 10 aa, Artificial Sequence
  source: /note="Description of Artificial Sequence: Synthetic peptide"
QHYESSPSWT

SEQ ID NO: 2613 - protein, 10 aa, Artificial Sequence
  source: /note="Description of Artificial Sequence: Synthetic peptide"
QQYGSPPRFT

SEQ ID NO: 2614 - protein, 10 aa, Artificial Sequence
  source: /note="Description of Artificial Sequence: Synthetic peptide"
QHYGSSPSWT

SEQ ID NO: 2615 - protein, 10 aa, Artificial Sequence
  source: /note="Description of Artificial Sequence: Synthetic peptide"
QHYDSSPSWT

SEQ ID NO: 2616 - protein, 10 aa, Artificial Sequence
  source: /note="Description of Artificial Sequence: Synthetic peptide"
QYYGTSPMYT

SEQ ID NO: 2617 - protein, 9 aa, Artificial Sequence
  source: /note="Description of Artificial Sequence: Synthetic peptide"
MQALQTPLT

SEQ ID NO: 2618 - protein, 11 aa, Artificial Sequence
  source: /note="Description of Artificial Sequence: Synthetic peptide"
QHYGNSPPKFT

SEQ ID NO: 2619 - protein, 10 aa, Artificial Sequence
  source: /note="Description of Artificial Sequence: Synthetic peptide"
QHYGGSPRLT

SEQ ID NO: 2620 - protein, 9 aa, Artificial Sequence
  source: /note="Description of Artificial Sequence: Synthetic peptide"
QQHYSTPWT

SEQ ID NO: 2621 - protein, 9 aa, Artificial Sequence
  source: /note="Description of Artificial Sequence: Synthetic peptide"
LQSRIFPRT

SEQ ID NO: 2622 - protein, 9 aa, Artificial Sequence
  source: /note="Description of Artificial Sequence: Synthetic peptide"
LQSRTIPRT

SEQ ID NO: 2623 - protein, 9 aa, Artificial Sequence
  source: /note="Description of Artificial Sequence: Synthetic peptide"
LQSRTIPRT

SEQ ID NO: 2624-2863 - skipped (240 entries)

SEQ ID NO: 2864 - protein, 10 aa, Artificial Sequence
  source: /note="Description of Artificial Sequence: Synthetic peptide"
GFTFSNYAMS

SEQ ID NO: 2865 - protein, 10 aa, Artificial Sequence
  source: /note="Description of Artificial Sequence: Synthetic peptide"
GFTFDDYAMH

SEQ ID NO: 2866 - protein, 10 aa, Artificial Sequence
  source: /note="Description of Artificial Sequence: Synthetic peptide"
GFALSNHGMS

SEQ ID NO: 2867 - protein, 10 aa, Artificial Sequence
  source: /note="Description of Artificial Sequence: Synthetic peptide"
GYIFDNFGIN

SEQ ID NO: 2868 - protein, 10 aa, Artificial Sequence
  source: /note="Description of Artificial Sequence: Synthetic peptide"
GFTFSSDAMT

SEQ ID NO: 2869 - protein, 10 aa, Artificial Sequence
  source: /note="Description of Artificial Sequence: Synthetic peptide"
GYTFSNYGIT

SEQ ID NO: 2870 - protein, 10 aa, Artificial Sequence
  source: /note="Description of Artificial Sequence: Synthetic peptide"
GFALSNHGMS

SEQ ID NO: 2871 - protein, 10 aa, Artificial Sequence
  source: /note="Description of Artificial Sequence: Synthetic peptide"
GFALSNHGMS

SEQ ID NO: 2872 - protein, 10 aa, Artificial Sequence
  source: /note="Description of Artificial Sequence: Synthetic peptide"
GFALSNHGMS

SEQ ID NO: 2873 - protein, 10 aa, Artificial Sequence
  source: /note="Description of Artificial Sequence: Synthetic peptide"
GFTFSDYYMS

SEQ ID NO: 2874 - protein, 10 aa, Artificial Sequence
  source: /note="Description of Artificial Sequence: Synthetic peptide"
GFALSNHGMS

SEQ ID NO: 2875 - protein, 10 aa, Artificial Sequence
  source: /note="Description of Artificial Sequence: Synthetic peptide"
GFTFSDYYMS

SEQ ID NO: 2876 - protein, 10 aa, Artificial Sequence
  source: /note="Description of Artificial Sequence: Synthetic peptide"
GFALSNHGMS

SEQ ID NO: 2877 - protein, 10 aa, Artificial Sequence
  source: /note="Description of Artificial Sequence: Synthetic peptide"
GFALSNHGMS

SEQ ID NO: 2878 - protein, 10 aa, Artificial Sequence
  source: /note="Description of Artificial Sequence: Synthetic peptide"
GFALSNHGMS

SEQ ID NO: 2879 - protein, 12 aa, Artificial Sequence
  source: /note="Description of Artificial Sequence: Synthetic peptide"
GGSISSSYYYWG

SEQ ID NO: 2880 - protein, 12 aa, Artificial Sequence
  source: /note="Description of Artificial Sequence: Synthetic peptide"
GFSLRTSGMCVS

SEQ ID NO: 2881 - protein, 10 aa, Artificial Sequence
  source: /note="Description of Artificial Sequence: Synthetic peptide"
GFTFSSYSMN

SEQ ID NO: 2882 - protein, 10 aa, Artificial Sequence
  source: /note="Description of Artificial Sequence: Synthetic peptide"
GFTFSDYYMS

SEQ ID NO: 2883 - protein, 10 aa, Artificial Sequence
  source: /note="Description of Artificial Sequence: Synthetic peptide"
GYTVTSHYIH

SEQ ID NO: 2884 - protein, 12 aa, Artificial Sequence
  source: /note="Description of Artificial Sequence: Synthetic peptide"
GGSISSGGYYWS

SEQ ID NO: 2885 - protein, 10 aa, Artificial Sequence
  source: /note="Description of Artificial Sequence: Synthetic peptide"
GGTFSSYAIS

SEQ ID NO: 2886 - protein, 12 aa, Artificial Sequence
  source: /note="Description of Artificial Sequence: Synthetic peptide"
GDSVSSNSAAWN

SEQ ID NO: 2887 - protein, 10 aa, Artificial Sequence
  source: /note="Description of Artificial Sequence: Synthetic peptide"
GFTFSSYAMS

SEQ ID NO: 2888 - protein, 10 aa, Artificial Sequence
  source: /note="Description of Artificial Sequence: Synthetic peptide"
GITFSRYPMS

SEQ ID NO: 2889 - protein, 10 aa, Artificial Sequence
  source: /note="Description of Artificial Sequence: Synthetic peptide"
GFTFSSYAMS

SEQ ID NO: 2890 - protein, 10 aa, Artificial Sequence
  source: /note="Description of Artificial Sequence: Synthetic peptide"
GFTFSSYAMS

SEQ ID NO: 2891 - protein, 10 aa, Artificial Sequence
  source: /note="Description of Artificial Sequence: Synthetic peptide"
GFTFDDYAMH

SEQ ID NO: 2892 - protein, 10 aa, Artificial Sequence
  source: /note="Description of Artificial Sequence: Synthetic peptide"
GFTFDDYAMH

SEQ ID NO: 2893 - protein, 10 aa, Artificial Sequence
  source: /note="Description of Artificial Sequence: Synthetic peptide"
GFTFSSYAMS

SEQ ID NO: 2894 - protein, 10 aa, Artificial Sequence
  source: /note="Description of Artificial Sequence: Synthetic peptide"
GFTFSSYAMS

SEQ ID NO: 2895 - protein, 10 aa, Artificial Sequence
  source: /note="Description of Artificial Sequence: Synthetic peptide"
GFTFSSYAMS

SEQ ID NO: 2896 - protein, 10 aa, Artificial Sequence
  source: /note="Description of Artificial Sequence: Synthetic peptide"
GFSFSSYAMS

SEQ ID NO: 2897 - protein, 10 aa, Artificial Sequence
  source: /note="Description of Artificial Sequence: Synthetic peptide"
GFTFSSYAMS

SEQ ID NO: 2898 - protein, 10 aa, Artificial Sequence
  source: /note="Description of Artificial Sequence: Synthetic peptide"
GFTFSSYAMS

SEQ ID NO: 2899 - protein, 10 aa, Artificial Sequence
  source: /note="Description of Artificial Sequence: Synthetic peptide"
GFTFSSYAMS

SEQ ID NO: 2900 - protein, 10 aa, Artificial Sequence
  source: /note="Description of Artificial Sequence: Synthetic peptide"
GYTFTNFGMN

SEQ ID NO: 2901 - protein, 10 aa, Artificial Sequence
  source: /note="Description of Artificial Sequence: Synthetic peptide"
GYTFTDYSIN

SEQ ID NO: 2902 - protein, 10 aa, Artificial Sequence
  source: /note="Description of Artificial Sequence: Synthetic peptide"
GYTFRHYSMN

SEQ ID NO: 2903 - protein, 10 aa, Artificial Sequence
  source: /note="Description of Artificial Sequence: Synthetic peptide"
GYTFTHYSMN

SEQ ID NO: 2904 - protein, 17 aa, Artificial Sequence
  source: /note="Description of Artificial Sequence: Synthetic peptide"
GISRSGENTYYADSVKG

SEQ ID NO: 2905 - protein, 17 aa, Artificial Sequence
  source: /note="Description of Artificial Sequence: Synthetic peptide"
GISWNSGSIGYADSVKG

SEQ ID NO: 2906 - protein, 16 aa, Artificial Sequence
  source: /note="Description of Artificial Sequence: Synthetic peptide"
GIVYSGSTYYAASVKG

SEQ ID NO: 2907 - protein, 17 aa, Artificial Sequence
  source: /note="Description of Artificial Sequence: Synthetic peptide"
WINPKNNNTNYAQKFQG

SEQ ID NO: 2908 - protein, 17 aa, Artificial Sequence
  source: /note="Description of Artificial Sequence: Synthetic peptide"
VISGSGGTTYYADSVKG

SEQ ID NO: 2909 - protein, 17 aa, Artificial Sequence
  source: /note="Description of Artificial Sequence: Synthetic peptide"
WISAYNGNTNYAQKFQG

SEQ ID NO: 2910 - protein, 16 aa, Artificial Sequence
  source: /note="Description of Artificial Sequence: Synthetic peptide"
GIVYSGSTYYAASVKG

SEQ ID NO: 2911 - protein, 16 aa, Artificial Sequence
  source: /note="Description of Artificial Sequence: Synthetic peptide"
GIVYSGSTYYAASVKG

SEQ ID NO: 2912 - protein, 16 aa, Artificial Sequence
  source: /note="Description of Artificial Sequence: Synthetic peptide"
GIVYSGSTYYAASVKG

SEQ ID NO: 2913 - protein, 17 aa, Artificial Sequence
  source: /note="Description of Artificial Sequence: Synthetic peptide"
YISSSGSTIYYADSVKG

SEQ ID NO: 2914 - protein, 16 aa, Artificial Sequence
  source: /note="Description of Artificial Sequence: Synthetic peptide"
GIVYSGSTYYAASVKG

SEQ ID NO: 2915 - protein, 17 aa, Artificial Sequence
  source: /note="Description of Artificial Sequence: Synthetic peptide"
YISSSGNTIYYADSVKG

SEQ ID NO: 2916 - protein, 16 aa, Artificial Sequence
  source: /note="Description of Artificial Sequence: Synthetic peptide"
GIVYSGSTYYAASVKG

SEQ ID NO: 2917 - protein, 16 aa, Artificial Sequence
  source: /note="Description of Artificial Sequence: Synthetic peptide"
GIVYSGSTYYAASVKG

SEQ ID NO: 2918 - protein, 16 aa, Artificial Sequence
  source: /note="Description of Artificial Sequence: Synthetic peptide"
GIVYSGSTYYAASVKG

SEQ ID NO: 2919 - protein, 16 aa, Artificial Sequence
  source: /note="Description of Artificial Sequence: Synthetic peptide"
SIYYSGSAYYNPSLKS

SEQ ID NO: 2920 - protein, 16 aa, Artificial Sequence
  source: /note="Description of Artificial Sequence: Synthetic peptide"
RIDWDEDKFYSTSLKT

SEQ ID NO: 2921 - protein, 17 aa, Artificial Sequence
  source: /note="Description of Artificial Sequence: Synthetic peptide"
SISSSSSYIYYADSVKG

SEQ ID NO: 2922 - protein, 17 aa, Artificial Sequence
  source: /note="Description of Artificial Sequence: Synthetic peptide"
YISSSGSTIYYADSVKG

SEQ ID NO: 2923 - protein, 17 aa, Artificial Sequence
  source: /note="Description of Artificial Sequence: Synthetic peptide"
MINPSGGVTAYSQTLQG

SEQ ID NO: 2924 - protein, 16 aa, Artificial Sequence
  source: /note="Description of Artificial Sequence: Synthetic peptide"
YIYYSGSTYYNPSLKS

SEQ ID NO: 2925 - protein, 17 aa, Artificial Sequence
  source: /note="Description of Artificial Sequence: Synthetic peptide"
GIIPIFGTANYAQKFQG

SEQ ID NO: 2926 - protein, 18 aa, Artificial Sequence
  source: /note="Description of Artificial Sequence: Synthetic peptide"
RTYYRSKWYSFYAISLKS

SEQ ID NO: 2927 - protein, 17 aa, Artificial Sequence
  source: /note="Description of Artificial Sequence: Synthetic peptide"
AISGSGGSTYYADSVKG

SEQ ID NO: 2928 - protein, 17 aa, Artificial Sequence
  source: /note="Description of Artificial Sequence: Synthetic peptide"
GISDSGVSTYYADSAKG

SEQ ID NO: 2929 - protein, 17 aa, Artificial Sequence
  source: /note="Description of Artificial Sequence: Synthetic peptide"
AISGSGGSTYYADSVKG

SEQ ID NO: 2930 - protein, 17 aa, Artificial Sequence
  source: /note="Description of Artificial Sequence: Synthetic peptide"
AISGSGGSTYYADSVKG

SEQ ID NO: 2931 - protein, 17 aa, Artificial Sequence
  source: /note="Description of Artificial Sequence: Synthetic peptide"
GISWNSGSIGYADSVKG

SEQ ID NO: 2932 - protein, 17 aa, Artificial Sequence
  source: /note="Description of Artificial Sequence: Synthetic peptide"
SINWKGNSLAYGDSVKG

SEQ ID NO: 2933 - protein, 17 aa, Artificial Sequence
  source: /note="Description of Artificial Sequence: Synthetic peptide"
AISGSGGSTYYADSVKG

SEQ ID NO: 2934 - protein, 17 aa, Artificial Sequence
  source: /note="Description of Artificial Sequence: Synthetic peptide"
AISGSGGSTYYADSVKG

SEQ ID NO: 2935 - protein, 17 aa, Artificial Sequence
  source: /note="Description of Artificial Sequence: Synthetic peptide"
AISGSGGSTYYADSVKG

SEQ ID NO: 2936 - protein, 17 aa, Artificial Sequence
  source: /note="Description of Artificial Sequence: Synthetic peptide"
AISGSGGSTYYADSVKG

SEQ ID NO: 2937 - protein, 17 aa, Artificial Sequence
  source: /note="Description of Artificial Sequence: Synthetic peptide"
AISGSGGSTYYADSVKG

SEQ ID NO: 2938 - protein, 17 aa, Artificial Sequence
  source: /note="Description of Artificial Sequence: Synthetic peptide"
AISGSGGSTYYADSVKG

SEQ ID NO: 2939 - protein, 17 aa, Artificial Sequence
  source: /note="Description of Artificial Sequence: Synthetic peptide"
AISGSGGSTYYADSVKG

SEQ ID NO: 2940 - protein, 17 aa, Artificial Sequence
  source: /note="Description of Artificial Sequence: Synthetic peptide"
WINTYTGESYFADDFKG

SEQ ID NO: 2941 - protein, 17 aa, Artificial Sequence
  source: /note="Description of Artificial Sequence: Synthetic peptide"
WINTETREPAYAYDFRG

SEQ ID NO: 2942 - protein, 17 aa, Artificial Sequence
  source: /note="Description of Artificial Sequence: Synthetic peptide"
RINTESGVPIYADDFKG

SEQ ID NO: 2943 - protein, 17 aa, Artificial Sequence
  source: /note="Description of Artificial Sequence: Synthetic peptide"
RINTETGEPLYADDFKG

SEQ ID NO: 2944 - protein, 11 aa, Artificial Sequence
  source: /note="Description of Artificial Sequence: Synthetic peptide"
SPAHYYGGMDV

SEQ ID NO: 2945 - protein, 6 aa, Artificial Sequence
  source: /note="Description of Artificial Sequence: Synthetic peptide"
HSFLAY

SEQ ID NO: 2946 - protein, 7 aa, Artificial Sequence
  source: /note="Description of Artificial Sequence: Synthetic peptide"
HGGESDV

SEQ ID NO: 2947 - protein, 11 aa, Artificial Sequence
  source: /note="Description of Artificial Sequence: Synthetic peptide"
GPYYYQSYMDV

SEQ ID NO: 2948 - protein, 14 aa, Artificial Sequence
  source: /note="Description of Artificial Sequence: Synthetic peptide"
LDSSGYYYARGPRY

SEQ ID NO: 2949 - protein, 9 aa, Artificial Sequence
  source: /note="Description of Artificial Sequence: Synthetic peptide"
GPYYYYMDV

SEQ ID NO: 2950 - protein, 7 aa, Artificial Sequence
  source: /note="Description of Artificial Sequence: Synthetic peptide"
HGGESDV

SEQ ID NO: 2951 - protein, 7 aa, Artificial Sequence
  source: /note="Description of Artificial Sequence: Synthetic peptide"
HGGESDV

SEQ ID NO: 2952 - protein, 7 aa, Artificial Sequence
  source: /note="Description of Artificial Sequence: Synthetic peptide"
HGGESDV

SEQ ID NO: 2953 - protein, 8 aa, Artificial Sequence
  source: /note="Description of Artificial Sequence: Synthetic peptide"
ESGDGMDV

SEQ ID NO: 2954 - protein, 7 aa, Artificial Sequence
  source: /note="Description of Artificial Sequence: Synthetic peptide"
HGGESDV

SEQ ID NO: 2955 - protein, 8 aa, Artificial Sequence
  source: /note="Description of Artificial Sequence: Synthetic peptide"
STMVREDY

SEQ ID NO: 2956 - protein, 7 aa, Artificial Sequence
  source: /note="Description of Artificial Sequence: Synthetic peptide"
HGGESDV

SEQ ID NO: 2957 - protein, 7 aa, Artificial Sequence
  source: /note="Description of Artificial Sequence: Synthetic peptide"
HGGESDV

SEQ ID NO: 2958 - protein, 7 aa, Artificial Sequence
  source: /note="Description of Artificial Sequence: Synthetic peptide"
HGGESDV

SEQ ID NO: 2959 - protein, 11 aa, Artificial Sequence
  source: /note="Description of Artificial Sequence: Synthetic peptide"
HWQEWPDAFDI

SEQ ID NO: 2960 - protein, 13 aa, Artificial Sequence
  source: /note="Description of Artificial Sequence: Synthetic peptide"
SGAGGTSATAFDI

SEQ ID NO: 2961 - protein, 10 aa, Artificial Sequence
  source: /note="Description of Artificial Sequence: Synthetic peptide"
TIAAVYAFDI

SEQ ID NO: 2962 - protein, 8 aa, Artificial Sequence
  source: /note="Description of Artificial Sequence: Synthetic peptide"
DLRGAFDI

SEQ ID NO: 2963 - protein, 11 aa, Artificial Sequence
  source: /note="Description of Artificial Sequence: Synthetic peptide"
EGSGSGWYFDF

SEQ ID NO: 2964 - protein, 13 aa, Artificial Sequence
  source: /note="Description of Artificial Sequence: Synthetic peptide"
AGIAARLRGAFDI

SEQ ID NO: 2965 - protein, 20 aa, Artificial Sequence
  source: /note="Description of Artificial Sequence: Synthetic peptide"
RGGYQLLRWDVGLLRSAFDI

SEQ ID NO: 2966 - protein, 13 aa, Artificial Sequence
  source: /note="Description of Artificial Sequence: Synthetic peptide"
SSPEGLFLYWFDP

SEQ ID NO: 2967 - protein, 9 aa, Artificial Sequence
  source: /note="Description of Artificial Sequence: Synthetic peptide"
VEGSGSLDY

SEQ ID NO: 2968 - protein, 9 aa, Artificial Sequence
  source: /note="Description of Artificial Sequence: Synthetic peptide"
RAGSEASDI

SEQ ID NO: 2969 - protein, 15 aa, Artificial Sequence
  source: /note="Description of Artificial Sequence: Synthetic peptide"
ATYKRELRYYYGMDV

SEQ ID NO: 2970 - protein, 15 aa, Artificial Sequence
  source: /note="Description of Artificial Sequence: Synthetic peptide"
ATYKRELRYYYGMDV

SEQ ID NO: 2971 - protein, 8 aa, Artificial Sequence
  source: /note="Description of Artificial Sequence: Synthetic peptide"
VGKAVPDV

SEQ ID NO: 2972 - protein, 13 aa, Artificial Sequence
  source: /note="Description of Artificial Sequence: Synthetic peptide"
HQGVAYYNYAMDV

SEQ ID NO: 2973 - protein, 8 aa, Artificial Sequence
  source: /note="Description of Artificial Sequence: Synthetic peptide"
VVRDGMDV

SEQ ID NO: 2974 - protein, 9 aa, Artificial Sequence
  source: /note="Description of Artificial Sequence: Synthetic peptide"
IPQTGTFDY

SEQ ID NO: 2975 - protein, 15 aa, Artificial Sequence
  source: /note="Description of Artificial Sequence: Synthetic peptide"
ANYKRELRYYYGMDV

SEQ ID NO: 2976 - protein, 11 aa, Artificial Sequence
  source: /note="Description of Artificial Sequence: Synthetic peptide"
ALVGATGAFDI

SEQ ID NO: 2977 - protein, 8 aa, Artificial Sequence
  source: /note="Description of Artificial Sequence: Synthetic peptide"
WFGEGFDP

SEQ ID NO: 2978 - protein, 17 aa, Artificial Sequence
  source: /note="Description of Artificial Sequence: Synthetic peptide"
VGYDSSGYYRDYYGMDV

SEQ ID NO: 2979 - protein, 13 aa, Artificial Sequence
  source: /note="Description of Artificial Sequence: Synthetic peptide"
MGWSSGYLGAFDI

SEQ ID NO: 2980 - protein, 13 aa, Artificial Sequence
  source: /note="Description of Artificial Sequence: Synthetic peptide"
GEIYYGYDGGFAY

SEQ ID NO: 2981 - protein, 8 aa, Artificial Sequence
  source: /note="Description of Artificial Sequence: Synthetic peptide"
DYSYAMDY

SEQ ID NO: 2982 - protein, 8 aa, Artificial Sequence
  source: /note="Description of Artificial Sequence: Synthetic peptide"
DYLYSLDF

SEQ ID NO: 2983 - protein, 8 aa, Artificial Sequence
  source: /note="Description of Artificial Sequence: Synthetic peptide"
DYLYSCDY

SEQ ID NO: 2984-2999 - skipped (16 entries)

SEQ ID NO: 3000 - protein, 11 aa, Artificial Sequence
  source: /note="Description of Artificial Sequence: Synthetic peptide"
RASQDIYNNLA

SEQ ID NO: 3001 - protein, 16 aa, Artificial Sequence
  source: /note="Description of Artificial Sequence: Synthetic peptide"
RSSQSLLHSNGYNYLD

SEQ ID NO: 3002 - protein, 11 aa, Artificial Sequence
  source: /note="Description of Artificial Sequence: Synthetic peptide"
GGNNIGTKSVH

SEQ ID NO: 3003 - protein, 11 aa, Artificial Sequence
  source: /note="Description of Artificial Sequence: Synthetic peptide"
SGDGLSKKYVS

SEQ ID NO: 3004 - protein, 11 aa, Artificial Sequence
  source: /note="Description of Artificial Sequence: Synthetic peptide"
RASQGIRNWLA

SEQ ID NO: 3005 - protein, 11 aa, Artificial Sequence
  source: /note="Description of Artificial Sequence: Synthetic peptide"
GGNNIGSKSVH

SEQ ID NO: 3006 - protein, 11 aa, Artificial Sequence
  source: /note="Description of Artificial Sequence: Synthetic peptide"
QGDSLGNYYAT

SEQ ID NO: 3007 - protein, 12 aa, Artificial Sequence
  source: /note="Description of Artificial Sequence: Synthetic peptide"
RASQSVSSAYLA

SEQ ID NO: 3008 - protein, 11 aa, Artificial Sequence
  source: /note="Description of Artificial Sequence: Synthetic peptide"
RASQSVSNSLA

SEQ ID NO: 3009 - protein, 12 aa, Artificial Sequence
  source: /note="Description of Artificial Sequence: Synthetic peptide"
RASQSVSSSFLA

SEQ ID NO: 3010 - protein, 12 aa, Artificial Sequence
  source: /note="Description of Artificial Sequence: Synthetic peptide"
RASQSVSTTFLA

SEQ ID NO: 3011 - protein, 11 aa, Artificial Sequence
  source: /note="Description of Artificial Sequence: Synthetic peptide"
RASQSISSYLN

SEQ ID NO: 3012 - protein, 12 aa, Artificial Sequence
  source: /note="Description of Artificial Sequence: Synthetic peptide"
RATQSIGSSFLA

SEQ ID NO: 3013 - protein, 12 aa, Artificial Sequence
  source: /note="Description of Artificial Sequence: Synthetic peptide"
RASQSVSSSYLA

SEQ ID NO: 3014 - protein, 12 aa, Artificial Sequence
  source: /note="Description of Artificial Sequence: Synthetic peptide"
RASQSVSSSYLA

SEQ ID NO: 3015 - protein, 12 aa, Artificial Sequence
  source: /note="Description of Artificial Sequence: Synthetic peptide"
RASQRVASNYLA

SEQ ID NO: 3016 - protein, 12 aa, Artificial Sequence
  source: /note="Description of Artificial Sequence: Synthetic peptide"
RASQSLSSNFLA

SEQ ID NO: 3017 - protein, 16 aa, Artificial Sequence
  source: /note="Description of Artificial Sequence: Synthetic peptide"
RSSQSLLHSNGYNYLD

SEQ ID NO: 3018 - protein, 12 aa, Artificial Sequence
  source: /note="Description of Artificial Sequence: Synthetic peptide"
RASQSVSSSYLA

SEQ ID NO: 3019 - protein, 12 aa, Artificial Sequence
  source: /note="Description of Artificial Sequence: Synthetic peptide"
RASQSVASSFLA

SEQ ID NO: 3020 - protein, 11 aa, Artificial Sequence
  source: /note="Description of Artificial Sequence: Synthetic peptide"
RASQDVNTAVS

SEQ ID NO: 3021 - protein, 15 aa, Artificial Sequence
  source: /note="Description of Artificial Sequence: Synthetic peptide"
RASESVSVIGAHLIH

SEQ ID NO: 3022 - protein, 15 aa, Artificial Sequence
  source: /note="Description of Artificial Sequence: Synthetic peptide"
RASESVTILGSHLIY

SEQ ID NO: 3023 - protein, 15 aa, Artificial Sequence
  source: /note="Description of Artificial Sequence: Synthetic peptide"
RASESVTILGSHLIY

SEQ ID NO: 3024 - protein, 7 aa, Artificial Sequence
  source: /note="Description of Artificial Sequence: Synthetic peptide"
GASRRAT

SEQ ID NO: 3025 - protein, 7 aa, Artificial Sequence
  source: /note="Description of Artificial Sequence: Synthetic peptide"
LGSNRAS

SEQ ID NO: 3026 - protein, 7 aa, Artificial Sequence
  source: /note="Description of Artificial Sequence: Synthetic peptide"
EVSNRFS

SEQ ID NO: 3027 - protein, 7 aa, Artificial Sequence
  source: /note="Description of Artificial Sequence: Synthetic peptide"
LGSKRAS

SEQ ID NO: 3028 - protein, 7 aa, Artificial Sequence
  source: /note="Description of Artificial Sequence: Synthetic peptide"
GASTLAS

SEQ ID NO: 3029 - protein, 7 aa, Artificial Sequence
  source: /note="Description of Artificial Sequence: Synthetic peptide"
LGSNRAS

SEQ ID NO: 3030 - protein, 7 aa, Artificial Sequence
  source: /note="Description of Artificial Sequence: Synthetic peptide"
GASTRAS

SEQ ID NO: 3031 - protein, 7 aa, Artificial Sequence
  source: /note="Description of Artificial Sequence: Synthetic peptide"
GASIRAT

SEQ ID NO: 3032 - protein, 7 aa, Artificial Sequence
  source: /note="Description of Artificial Sequence: Synthetic peptide"
DASNRAT

SEQ ID NO: 3033 - protein, 7 aa, Artificial Sequence
  source: /note="Description of Artificial Sequence: Synthetic peptide"
AASSLQS

SEQ ID NO: 3034 - skipped

SEQ ID NO: 3035 - protein, 7 aa, Artificial Sequence
  source: /note="Description of Artificial Sequence: Synthetic peptide"
EVSNRDS

SEQ ID NO: 3036 - protein, 7 aa, Artificial Sequence
  source: /note="Description of Artificial Sequence: Synthetic peptide"
DASTLQT

SEQ ID NO: 3037 - protein, 7 aa, Artificial Sequence
  source: /note="Description of Artificial Sequence: Synthetic peptide"
GASTRAT

SEQ ID NO: 3038 - protein, 7 aa, Artificial Sequence
  source: /note="Description of Artificial Sequence: Synthetic peptide"
GASSRAS

SEQ ID NO: 3039 - protein, 7 aa, Artificial Sequence
  source: /note="Description of Artificial Sequence: Synthetic peptide"
SATSPVP

SEQ ID NO: 3040 - protein, 7 aa, Artificial Sequence
  source: /note="Description of Artificial Sequence: Synthetic peptide"
AANKSQS

SEQ ID NO: 3041 - protein, 7 aa, Artificial Sequence
  source: /note="Description of Artificial Sequence: Synthetic peptide"
LGSNRAS

SEQ ID NO: 3042 - protein, 7 aa, Artificial Sequence
  source: /note="Description of Artificial Sequence: Synthetic peptide"
DDSVRPS

SEQ ID NO: 3043 - protein, 7 aa, Artificial Sequence
  source: /note="Description of Artificial Sequence: Synthetic peptide"
RDKERPS

SEQ ID NO: 3044 - protein, 7 aa, Artificial Sequence
  source: /note="Description of Artificial Sequence: Synthetic peptide"
AASNLQS

SEQ ID NO: 3045 - protein, 7 aa, Artificial Sequence
  source: /note="Description of Artificial Sequence: Synthetic peptide"
GKNNRPS

SEQ ID NO: 3046 - protein, 7 aa, Artificial Sequence
  source: /note="Description of Artificial Sequence: Synthetic peptide"
GTNNRPS

SEQ ID NO: 3047 - protein, 7 aa, Artificial Sequence
  source: /note="Description of Artificial Sequence: Synthetic peptide"
GASTRAT

SEQ ID NO: 3048 - protein, 7 aa, Artificial Sequence
  source: /note="Description of Artificial Sequence: Synthetic peptide"
DASSRAT

SEQ ID NO: 3049 - protein, 7 aa, Artificial Sequence
  source: /note="Description of Artificial Sequence: Synthetic peptide"
GASSRAT

SEQ ID NO: 3050 - protein, 7 aa, Artificial Sequence
  source: /note="Description of Artificial Sequence: Synthetic peptide"
GSSNRAT

SEQ ID NO: 3051 - protein, 7 aa, Artificial Sequence
  source: /note="Description of Artificial Sequence: Synthetic peptide"
AASSLQS

SEQ ID NO: 3052 - protein, 7 aa, Artificial Sequence
  source: /note="Description of Artificial Sequence: Synthetic peptide"
GASQRAT

SEQ ID NO: 3053 - protein, 7 aa, Artificial Sequence
  source: /note="Description of Artificial Sequence: Synthetic peptide"
GASSRAT

SEQ ID NO: 3054 - protein, 7 aa, Artificial Sequence
  source: /note="Description of Artificial Sequence: Synthetic peptide"
GASSRAT

SEQ ID NO: 3055 - protein, 7 aa, Artificial Sequence
  source: /note="Description of Artificial Sequence: Synthetic peptide"
GASSRAT

SEQ ID NO: 3056 - protein, 7 aa, Artificial Sequence
  source: /note="Description of Artificial Sequence: Synthetic peptide"
GASNWAT

SEQ ID NO: 3057 - protein, 7 aa, Artificial Sequence
  source: /note="Description of Artificial Sequence: Synthetic peptide"
LGSNRAS

SEQ ID NO: 3058 - protein, 7 aa, Artificial Sequence
  source: /note="Description of Artificial Sequence: Synthetic peptide"
GTSSRAT

SEQ ID NO: 3059 - protein, 7 aa, Artificial Sequence
  source: /note="Description of Artificial Sequence: Synthetic peptide"
GASGRAT

SEQ ID NO: 3060 - protein, 7 aa, Artificial Sequence
  source: /note="Description of Artificial Sequence: Synthetic peptide"
SASYRYT

SEQ ID NO: 3061 - protein, 7 aa, Artificial Sequence
  source: /note="Description of Artificial Sequence: Synthetic peptide"
LASNLET

SEQ ID NO: 3062 - protein, 7 aa, Artificial Sequence
  source: /note="Description of Artificial Sequence: Synthetic peptide"
LASNVQT

SEQ ID NO: 3063 - protein, 7 aa, Artificial Sequence
  source: /note="Description of Artificial Sequence: Synthetic peptide"
LASNVQT

SEQ ID NO: 3064 - protein, 10 aa, Artificial Sequence
  source: /note="Description of Artificial Sequence: Synthetic peptide"
QQYHSSPSWT

SEQ ID NO: 3065 - protein, 9 aa, Artificial Sequence
  source: /note="Description of Artificial Sequence: Synthetic peptide"
MQALQTPYT

SEQ ID NO: 3066 - protein, 8 aa, Artificial Sequence
  source: /note="Description of Artificial Sequence: Synthetic peptide"
MQNIQFPS

SEQ ID NO: 3067 - protein, 9 aa, Artificial Sequence
  source: /note="Description of Artificial Sequence: Synthetic peptide"
MQALQTPYT

SEQ ID NO: 3068 - protein, 8 aa, Artificial Sequence
  source: /note="Description of Artificial Sequence: Synthetic peptide"
QQSYKRAS

SEQ ID NO: 3069 - protein, 9 aa, Artificial Sequence
  source: /note="Description of Artificial Sequence: Synthetic peptide"
MQGRQFPYS

SEQ ID NO: 3070 - protein, 8 aa, Artificial Sequence
  source: /note="Description of Artificial Sequence: Synthetic peptide"
QQYGSSLT

SEQ ID NO: 3071 - protein, 9 aa, Artificial Sequence
  source: /note="Description of Artificial Sequence: Synthetic peptide"
QQYGSSSWT

SEQ ID NO: 3072 - protein, 10 aa, Artificial Sequence
  source: /note="Description of Artificial Sequence: Synthetic peptide"
QQYGSSPPWT

SEQ ID NO: 3073 - protein, 7 aa, Artificial Sequence
  source: /note="Description of Artificial Sequence: Synthetic peptide"
QQSYTLA

SEQ ID NO: 3074 - protein, 9 aa, Artificial Sequence
  source: /note="Description of Artificial Sequence: Synthetic peptide"
QQSYSTPYT

SEQ ID NO: 3075 - protein, 9 aa, Artificial Sequence
  source: /note="Description of Artificial Sequence: Synthetic peptide"
MQGTHWPGT

SEQ ID NO: 3076 - protein, 9 aa, Artificial Sequence
  source: /note="Description of Artificial Sequence: Synthetic peptide"
QQYESLPLT

SEQ ID NO: 3077 - protein, 10 aa, Artificial Sequence
  source: /note="Description of Artificial Sequence: Synthetic peptide"
QQYNDWLPVT

SEQ ID NO: 3078 - protein, 10 aa, Artificial Sequence
  source: /note="Description of Artificial Sequence: Synthetic peptide"
QQYAGSPPFT

SEQ ID NO: 3079 - protein, 9 aa, Artificial Sequence
  source: /note="Description of Artificial Sequence: Synthetic peptide"
LQHDNFPLT

SEQ ID NO: 3080 - protein, 9 aa, Artificial Sequence
  source: /note="Description of Artificial Sequence: Synthetic peptide"
QHYYRFPYS

SEQ ID NO: 3081 - protein, 9 aa, Artificial Sequence
  source: /note="Description of Artificial Sequence: Synthetic peptide"
MQALQTPYT

SEQ ID NO: 3082 - protein, 11 aa, Artificial Sequence
  source: /note="Description of Artificial Sequence: Synthetic peptide"
QVWDSDSEHVV

SEQ ID NO: 3083 - protein, 9 aa, Artificial Sequence
  source: /note="Description of Artificial Sequence: Synthetic peptide"
QAWDDTTVV

SEQ ID NO: 3084 - protein, 9 aa, Artificial Sequence
  source: /note="Description of Artificial Sequence: Synthetic peptide"
QKYNSAPFT

SEQ ID NO: 3085 - protein, 12 aa, Artificial Sequence
  source: /note="Description of Artificial Sequence: Synthetic peptide"
SSRDSSGDHLRV

SEQ ID NO: 3086 - protein, 11 aa, Artificial Sequence
  source: /note="Description of Artificial Sequence: Synthetic peptide"
NSRDSSGHHLL

SEQ ID NO: 3087 - protein, 14 aa, Artificial Sequence
  source: /note="Description of Artificial Sequence: Synthetic peptide"
QHYGSSFNGSSLFT

SEQ ID NO: 3088 - protein, 10 aa, Artificial Sequence
  source: /note="Description of Artificial Sequence: Synthetic peptide"
QQFGTSSGLT

SEQ ID NO: 3089 - protein, 10 aa, Artificial Sequence
  source: /note="Description of Artificial Sequence: Synthetic peptide"
QQYHSSPSWT

SEQ ID NO: 3090 - protein, 10 aa, Artificial Sequence
  source: /note="Description of Artificial Sequence: Synthetic peptide"
QQYHSSPSWT

SEQ ID NO: 3091 - protein, 9 aa, Artificial Sequence
  source: /note="Description of Artificial Sequence: Synthetic peptide"
QQSYSTPYS

SEQ ID NO: 3092 - protein, 10 aa, Artificial Sequence
  source: /note="Description of Artificial Sequence: Synthetic peptide"
QHYESSPSWT

SEQ ID NO: 3093 - protein, 10 aa, Artificial Sequence
  source: /note="Description of Artificial Sequence: Synthetic peptide"
QQYGSPPRFT

SEQ ID NO: 3094 - protein, 10 aa, Artificial Sequence
  source: /note="Description of Artificial Sequence: Synthetic peptide"
QHYGSSPSWT

SEQ ID NO: 3095 - protein, 10 aa, Artificial Sequence
  source: /note="Description of Artificial Sequence: Synthetic peptide"
QHYDSSPSWT

SEQ ID NO: 3096 - protein, 10 aa, Artificial Sequence
  source: /note="Description of Artificial Sequence: Synthetic peptide"
QYYGTSPMYT

SEQ ID NO: 3097 - protein, 9 aa, Artificial Sequence
  source: /note="Description of Artificial Sequence: Synthetic peptide"
MQALQTPLT

SEQ ID NO: 3098 - protein, 11 aa, Artificial Sequence
  source: /note="Description of Artificial Sequence: Synthetic peptide"
QHYGNSPPKFT

SEQ ID NO: 3099 - protein, 10 aa, Artificial Sequence
  source: /note="Description of Artificial Sequence: Synthetic peptide"
QHYGGSPRLT

SEQ ID NO: 3100 - protein, 9 aa, Artificial Sequence
  source: /note="Description of Artificial Sequence: Synthetic peptide"
QQHYSTPWT

SEQ ID NO: 3101 - protein, 9 aa, Artificial Sequence
  source: /note="Description of Artificial Sequence: Synthetic peptide"
LQSRIFPRT

SEQ ID NO: 3102 - protein, 9 aa, Artificial Sequence
  source: /note="Description of Artificial Sequence: Synthetic peptide"
LQSRTIPRT

SEQ ID NO: 3103 - protein, 9 aa, Artificial Sequence
  source: /note="Description of Artificial Sequence: Synthetic peptide"
LQSRTIPRT

SEQ ID NO: 3104-3199 - skipped (96 entries)

SEQ ID NO: 3200 - protein, 20 aa, Artificial Sequence
  source: /note="Description of Artificial Sequence: Synthetic peptide"
GGGGSGGGGSGGGGSGGGGS

SEQ ID NO: 3201-3983 - skipped (783 entries)

SEQ ID NO: 3984 - protein, 12 aa, Artificial Sequence
  source: /note="Description of Artificial Sequence: Synthetic peptide"
RASQSISSSFLA

SEQ ID NO: 3985 - protein, 16 aa, Artificial Sequence
  source: /note="Description of Artificial Sequence: Synthetic peptide"
RSSQSLLHSNGYNYLD

SEQ ID NO: 3986 - protein, 16 aa, Artificial Sequence
  source: /note="Description of Artificial Sequence: Synthetic peptide"
KSSQSLLRNDGKTPLY

SEQ ID NO: 3987 - protein, 16 aa, Artificial Sequence
  source: /note="Description of Artificial Sequence: Synthetic peptide"
RSSQSLLHSNGYNYLN

SEQ ID NO: 3988 - protein, 11 aa, Artificial Sequence
  source: /note="Description of Artificial Sequence: Synthetic peptide"
RASQSISSYLN

SEQ ID NO: 3989 - protein, 16 aa, Artificial Sequence
  source: /note="Description of Artificial Sequence: Synthetic peptide"
RSSQSLLYSNGYNYVD

SEQ ID NO: 3990 - protein, 11 aa, Artificial Sequence
  source: /note="Description of Artificial Sequence: Synthetic peptide"
RASQSVSSNLA

SEQ ID NO: 3991 - protein, 11 aa, Artificial Sequence
  source: /note="Description of Artificial Sequence: Synthetic peptide"
RASQSVSSKLA

SEQ ID NO: 3992 - protein, 12 aa, Artificial Sequence
  source: /note="Description of Artificial Sequence: Synthetic peptide"
RASQSVGSTNLA

SEQ ID NO: 3993 - protein, 11 aa, Artificial Sequence
  source: /note="Description of Artificial Sequence: Synthetic peptide"
RASQSISSYLN

SEQ ID NO: 3994 - protein, 11 aa, Artificial Sequence
  source: /note="Description of Artificial Sequence: Synthetic peptide"
RASQSISSYLN

SEQ ID NO: 3995 - protein, 16 aa, Artificial Sequence
  source: /note="Description of Artificial Sequence: Synthetic peptide"
KSSESLVHNSGKTYLN

SEQ ID NO: 3996 - protein, 11 aa, Artificial Sequence
  source: /note="Description of Artificial Sequence: Synthetic peptide"
QASEDINKFLN

SEQ ID NO: 3997 - protein, 11 aa, Artificial Sequence
  source: /note="Description of Artificial Sequence: Synthetic peptide"
RASQSVGSNLA

SEQ ID NO: 3998 - protein, 12 aa, Artificial Sequence
  source: /note="Description of Artificial Sequence: Synthetic peptide"
RASQSIGSSSLA

SEQ ID NO: 3999 - protein, 11 aa, Artificial Sequence
  source: /note="Description of Artificial Sequence: Synthetic peptide"
KASQDIDDAMN

SEQ ID NO: 4000 - protein, 119 aa, Artificial Sequence
  source: /note="Description of Artificial Sequence: Synthetic polypeptide"
QVQLLESGAELVRPGSSVKISCKASGYAFSSYWMNWVKQRPGQGLEWIGQIYPGDGDTNYNGKFKGQATLTADKSSSTAYMQLSGLTSEDSAVYSCARKTISSVVDFYFDYWGQGTTVT

SEQ ID NO: 4001 - protein, 111 aa, Artificial Sequence
  source: /note="Description of Artificial Sequence: Synthetic polypeptide"
ELVLTQSPKFMSTSVGDRVSVTCKASQNVGTNVAWYQQKPGQSPKPLIYSATYRNSGVPDRFTGSGSGTDFTLTITNVQSKDLADYFYFCQYNRYPYTSGGGTKLEIKRRS

SEQ ID NO: 4002 - protein, 10 aa, Artificial Sequence
  source: /note="Description of Artificial Sequence: Synthetic peptide"
YCARGNWDDY
